(19) United States
(12) Patent Application Publication
(10) Pub. No.: US 2016/0244766 A1
(43) Pub. Date: Aug. 25, 2016

(54) COMPOSITIONS AND METHODS FOR INHIBITING EXPRESSION OF THE ALAS1 GENE

(71) Applicants: ALNYLAM PHARMACEUTICALS, INC., Cambridge, MA (US); ICAHN SCHOOL OF MEDICINE AT MOUNT SINAI, New York, NY (US)

(72) Inventors: Brian Bettencourt, Groton, MA (US); Kevin Fitzgerald, Brookline, MA (US); William Querbes, Cambridge, MA (US); Robert J. Desnick, New York, NY (US); Makiko Yasuda, New York, NY (US)

(73) Assignees: ALNYLAM PHARMACEUTICALS, INC., Cambridge, MA (US); ICAHN SCHOOL OF MEDICINE AT MOUNT SINAI, New York, NY (US)

(21) Appl. No.: 15/027,176

(22) PCT Filed: Oct. 3, 2014
(86) PCT No.: PCT/US2014/059160

§ 371 Date: Apr. 4, 2016

Related U.S. Application Data
(60) Provisional application No. 61/983,720, filed on Apr. 24, 2014.
(60) Provisional application No. 61/887,288, filed on Oct. 4, 2013.

(51) Int. Cl. C12N 15/113; C12Q 1/68; A61K 9/00

(52) U.S. Cl. CPC C12N 15/1137; A61K 9/0019; C12Q 1/6876; C12N 2310/14; C12N 2310/321; C12N 2310/315; C12N 2310/351

(57) ABSTRACT

The invention relates to double-stranded ribonucleic acid (dsRNA) compositions targeting the ALAS1 gene, and methods of using such dsRNA compositions to alter (e.g., inhibit) expression of ALAS1.

### RELATED APPLICATIONS

[0001] This application claims priority to U.S. provisional application No. 61/887,288 filed on Oct. 4, 2013 and to U.S. provisional application No. 61/983,720 filed on Apr. 24, 2014. The entire content of each of the foregoing applications is hereby incorporated herein by reference.

### SEQUENCE LISTING

[0002] The instant application contains a Sequence Listing which has been submitted electronically in ASCII format and is hereby incorporated by reference in its entirety. Said ASCII copy, created on Oct. 2, 2014, is named A2038-7202WO_SL.txt and is 1,107,486 bytes in size.

### FIELD OF THE INVENTION

[0003] The invention relates to the specific inhibition of the expression of the ALAS1 gene.

### BACKGROUND OF THE INVENTION

[0004] The inherited porphyrias are a family of disorders resulting from the deficient activity of specific enzymes in the heme biosynthetic pathway, also referred to herein as the porphyrin pathway. Deficiency in the enzymes of the porphyrin pathway leads to insufficient heme production and to an accumulation of porphyrin precursors and porphyrins, which are toxic to tissue in high concentrations.

[0005] Of the inherited porphyrias, acute intermittent porphyria (AIP, e.g., autosomal dominant AIP), variegate porphyria (VP, e.g., autosomal dominant VP), hereditary coproporphyria (copropophyria or HCP, e.g., autosomal dominant HCP), and 5′ aminolevulinic acid (also known as δ-aminolevulinic acid or ALA) dehydratase deficiency porphyria (ADP, e.g., autosomal recessive ADP) are classified as acute hepatic porphyrias and are manifested by acute neurological attacks that can be life threatening. The acute attacks are characterized by autonomic, peripheral, and central nervous symptoms, including severe abdominal pain, hypertension, tachycardias, constipation, motor weakness, paralysis, and seizures. If not treated properly, quadriplegia, respiratory impairment, and death may ensue. Various factors, including cytrochrome P450-inducing drugs, dieting, and hormonoal changes can precipitate acute attacks by increasing the activity of hepatic 5′-aminolevulinic acid synthase 1 (ALAS1), the first and rate-limiting enzyme of the heme biosynthetic pathway. In the acute porphyrias, e.g., AIP, VP, HCP and ADP, the respective enzyme deficiencies result in hepatic production and accumulation of one or more substances (e.g., porphyrins and/or porphyrin precursors, e.g., ALA and/or PBG) that can be neurotoxic and can result in the occurrence of acute attacks. See, e.g., Balwani, M and Desnick, R. J., Blood, 120:4496-4504, 2012.

[0006] The current therapy for the acute neurologic attacks is the intravenous administration of hemin (Panhematin®, Lundbeck or Normosang®, Orphan Europe), which provides exogenous heme for the negative feedback inhibition of ALAS1, and thereby, decreases production of ALA and PBG. Hemin is used for the treatment during an acute attack and for prevention of attacks, particularly in women with the actue porphyrias who experience frequent attacks with the hormonal changes during their menstrual cycles. While patients generally respond well, its effect is slow, typically taking two to four days or longer to normalize urinary ALA and PBG concentrations towards normal levels. As the intravenous hemin is rapidly metabolized, three to four infusions are usually necessary to effectively treat or prevent an acute attack. In addition, repeated infusions may cause iron overload and phlebitis, which may compromise peripheral venous access. Although orthotrophic liver transplantation is curative, this procedure has significant morbidity and mortality and the availability of liver donors is limited. Therefore, an alternative therapeutic approach that is more effective, fast-acting, and safe is needed. It would be particularly advantageous if such treatment could be delivered by subcutaneous administration, as this would preclude the need for infusions and prolonged hospitalization.

[0007] AIP, also referred to as porphobilinogen deaminase (PBGD) deficiency, or hydroxymethylbilane synthase (HMBS) deficiency, is the most common of the acute hepatic prophyrias. The prevalence of AIP is estimated to be 5-10 in 100,000, with about 5-10% of patients being symptomatic. AIP is an autosomal dominant disorder caused by mutations in the HMBS gene that result in reduced, e.g., half-normal activity of the enzyme. Previously, a mouse model of AIP that has ˜30% of wildtype HMBS activity was generated by homologous recombination. Like human patients, these mice increase hepatic ALAS1 activity and accumulate large quantities of plasma and urinary ALA and PBG when administered porphyrinogenic drugs, such as phenobarbital. Thus, they serve as an excellent model to evaluate the efficacy of novel therapeutics for the acute hepatic porphyrias.

### SUMMARY OF THE INVENTION

[0008] The present invention describes methods and iRNA compositions for modulating the expression of an ALAS1 gene. In certain embodiments, expression of an ALAS1 gene is reduced or inhibited using an ALAS1-specific iRNA. Such inhibition can be useful in treating disorders related to ALAS1 expression, such as porphyrias.

[0009] Accordingly, described herein are compositions and methods that effect the RNA-induced silencing complex (RISC)-mediated cleavage of RNA transcripts of the ALAS1 gene, such as in a cell or in a subject (e.g., in a mammal, such as a human subject). Also described are compositions and methods for treating a disorder related to expression of an ALAS1 gene, such as a porphyria, e.g., X-linked sideroblastic anemia (XLSA), ALA deyhdratase deficiency porphyria (Doss porphyria or ADP), acute intermittent porphyria (AIP), congenital erythropoietic porphyria (CEP), prophyria cutanea tarda (PCT), hereditary coproporphyria (coproporphyria, or HCP), variegate porphyria (VP), erythropoietic protoporphyria (EPP), or transient erythroporphyria of infancy. In some embodiments, the disorder is an acute hepatic porphyria, e.g., ALA deyhdratase deficiency porphyria (ADP), AIP, HCP, or VP. In certain embodiments, the disorder is ALA deyhdratase deficiency porphyria (ADP) or AIP.

[0010] In embodiments, the porphyria is a hepatic porphyria, e.g., a porphyria selected from acute intermittent porphyria (AIP) hereditary coproporphyria (HCP), variegate porphyria (VP), ALA deyhdratase deficiency porphyria (ADP), and hepatoerythropoietic porphyria. In embodiments, the porphyria is a homozygous dominant hepatic porphyria (e.g., homozygous dominant AIP, HCP, or VP) or hepatoerythropoietic porphyria, In embodiments, the porphyria is a dual porphyria.

[0011] As used herein, the term “iRNA,” “RNAi”, “iRNA agent,” “RNAi agent,” or “iRNA molecule,” refers to an agent that contains RNA as that term is defined herein, and which mediates the targeted cleavage of an RNA transcript, e.g., via an RNA-induced silencing complex (RISC) pathway. In one embodiment, an iRNA as described herein effects inhibition of ALAS1 expression in a cell or mammal.

[0012] The iRNAs included in the compositions featured herein encompass a dsRNA having an RNA strand (the antisense strand) having a region, e.g., a region that is 30 nucleotides or less, generally 19-24 nucleotides in length, that is substantially complementary to at least part of an mRNA transcript of an ALAS1 gene (e.g., a mouse or human ALAS1 gene) (also referred to herein as an “ALAS1-specific iRNA”). Alternatively, or in combination, iRNAs encompass a dsRNA having an RNA strand (the antisense strand) having a region that is 30 nucleotides or less, generally 19-24 nucleotides in length, that is substantially complementary to at least part of an mRNA transcript of an ALAS1 gene (e.g., a human variant 1 or 2 of an ALAS1 gene) (also referred to herein as a “ALAS1-specific iRNA”).

[0013] In embodiments, the iRNA (e.g, dsRNA) described herein comprises an antisense strand having a region that is substantially complementary to a region of a human ALAS1. In embodiments, the human ALAS1 has the sequence of NM_000688.4 (SEQ ID NO:1) or NM_000688.5 (SEQ ID NO:382). In embodiments, the human ALAS1 has the sequence of NM_199166.1.

[0014] In embodiments, the antisense sequence of the iRNA (e.g., dsRNA) targets within the to 895 (plus or minus 5, 4, 3, 2, or 1 nucleotides in either or both directions on the 5′ and/or 3′ end) on the ALAS1 transcript NM_000688.4. In embodiments, the antisense sequence targets the nucleotides 871 to 893, 871 to 892, or 873 to 895 on the ALAS1 transcript NM_000688.4. In embodiments, the antisense sequence comprises or consists of a sequence that is fully complementary or substantially complementary to nucleotides 871 to 893, 871 to 892, or 873 to 895 on the ALAS1 transcript NM_000688.4.

[0015] In one aspect, a double-stranded ribonucleic acid (dsRNA) for inhibiting expression of ALAS1 is provided, wherein said dsRNA comprises a sense strand and an antisense strand, the antisense strand comprising a region of complementarity to an ALAS1 RNA transcript, which antisense strand comprises at least 15 (e.g., at least 16, 17, 18, 19, 20, 21, 22, or 23) contiguous nucleotides differing by no more than 3, 2 or 1 nucleotides from the sequence of UAAGAUGAGACACUCUUUCUGGU (SEQ ID NO: 4153) or UAAGAUGAGACACUCTUUCUGGU (SEQ ID NO: 4154). In embodiments, the antisense strand comprises the sequence of UAAGAUGAGACACUCUUUCUGGU (SEQ ID NO: 4153) or UAAGAUGAGACACUCTUUCUGGU (SEQ ID NO: 4154). In embodiments, the sense strand comprises the sequence of CAGAAAGAGUGUCUCAUCUUA (SEQ ID NO: 4155). In embodiments, one or more nucleotides of the antisense strand and/or sense strand are modified as described herein. In embodiments, the dsRNA comprises (i) an antisense strand that comprises, or consists of, the antisense sequence of AD-60489, AD-60519, or AD-61193 and/or (ii) a sense strand that comprises, or consists of, the sense sequence of AD-60489, AD-60519, or AD-61193 (including one or more (e.g., all) of the modifications of the antisense strand and/or antisense strand of AD-60489, AD-60519, or AD-61193).

[0016] In one aspect, a double-stranded ribonucleic acid (dsRNA) for inhibiting expression of ALAS1 is provided, wherein said dsRNA comprises a sense strand and an antisense strand, the antisense strand comprising a region of complementarity to an ALAS1 RNA transcript, which antisense strand comprises at least 15 (e.g., at least 16, 17, 18, 19, 20, 21, 22, or 23) contiguous nucleotides differing by no more than 3 (e.g., by no more than 0, 1 or 2) nucleotides from an antisense sequence listed in any one of Tables 21 to 40, or an unmodified version of an antisense sequence (e.g., a version having the same nucleotide sequence except that some or all of the nucleotides are unmodified) listed in any one of Tables 21 to 40. In one embodiment, the antisense sequence comprises at least 15 (e.g., at least 16, 17, 18, 19, 20, 21, 22, or 23) contiguous nucleotides differing by no more than 3 (e.g., by no more than 0, 1 or 2) nucleotides from (i) the antisense sequence of AD-60489, AD-60519, or AD-61193 or (ii) an unmodified version of any one of these sequences. In embodiments, the antisense strand comprises at least 15 (e.g., at least 16, 17, 18, 19, 20, 21, 22, or 23) contiguous nucleotides differing by no more than 3 (e.g., by no more than 0, 1 or 2) nucleotides from the sequence of UAAGAUGAGACACUCUUUCUGGU (SEQ ID NO: 4153) or UAAGAUGAGACACUCTUUCUGGU (SEQ ID NO: 4154). In an embodiment, the antisense sequence targets positions 871-893 of NM_000688.4 (SEQ ID NO:1). In embodiments, the sense strand comprises the sequence of CAGAAAGAGUGUCUCAUCUUA (SEQ ID NO: 4155). In embodiments, one or more nucleotides of the antisense strand and/or sense strand are modified as described herein.

[0017] In some embodiments, the dsRNA is not a sense and/or antisense sequence listed in any one of Tables 2, 3, 6, 7, 8, 9, 14, 15, 18 or 20.

[0018] In one embodiment, a double-stranded ribonucleic acid (dsRNA) for inhibiting expression of ALAS1 is provided, wherein said dsRNA comprises a sense strand and an antisense strand, the antisense strand comprising a region of complementarity to an ALAS1 RNA transcript, which antisense strand comprises at least 15 (e.g., at least 16, 17, 18, 19, 20, 21, 22, or 23) contiguous nucleotides differing by no more than 3 nucleotides, no more than 2 nucleotides, or no more than one nucleotide, from the antisense sequence of AD-60519. In embodiments, one or more nucleotides are modified as described herein.

[0019] In one embodiment, a double-stranded ribonucleic acid (dsRNA) for inhibiting expression of ALAS1 is provided, wherein said dsRNA comprises a sense strand and an antisense strand, the antisense strand comprising a region of complementarity to an ALAS1 RNA transcript, which antisense strand comprises at least 15 (e.g., at least 16, 17, 18, 19, 20, 21, 22, or 23) contiguous nucleotides differing by no more than 3 (e.g., by no more than 0, 1 or 2) nucleotides from the antisense sequence of AD-60489, or a derivative of AD-60489 as described herein. In embodiments, one or more nucleotides are modified as described herein, e.g., one or more (or all) nucleotides of AD-60489 are modified as described herein. In embodiments, the derivative of AD-60489 is AD-60501, AD-60519, AD-60901, AD-60495, AD-60900, AD-60935, AD-60879, AD-61190, AD-61191, AD-60865, AD-60861, AD-60876, AD-61193, AD-60519, AD-60519, or AD-60901. In embodiments, the derivative of AD-60489 is AD-60519. In embodiments, the derivative of AD-60489 is AD-61193.

[0020] In one embodiment, a double-stranded ribonucleic acid (dsRNA) for inhibiting expression of ALAS1 is provided, wherein said dsRNA comprises a sense strand and an antisense strand, the antisense strand comprising a region of complementarity to an ALAS1 RNA transcript, which antisense strand comprises at least 15 (e.g., at least 16, 17, 18, 19, 20, 21, 22, or 23) contiguous nucleotides differing by no more than 3 (e.g., by no more than 0, 1 or 2) nucleotides from a derivative of AD-58632 described herein. In embodiments, one or more nucleotides are modified as described herein, e.g., one or more (or all) nucleotides of AD-58632 are modified as described herein. In embodiments, the derivative of AD-58632 is AD-60405, AD-60887, AD-60923, AD-60434, AD-60892, AD-60419, AD-60924, AD-60445, AD-60925, and AD-60926, AD-60820, AD-60843, AD-60819, AD-61140, AD-61141, AD-61142, AD-60835, AD-60839, AD-61143, AD-61144, AD-61145, AD-61146, AD-60892, or AD-60419. In embodiments, the derivative of AD-58632 is AD-60819.

[0021] In some embodiments, the dsRNA has an IC₅₀ of less than 1 nM. In some embodiments, the dsRNA has an IC₅₀ in the range of 0.01-1 nM. In embodiments, the dsRNA has an IC₅₀ of less than 0.05 nM. In embodiments, the dsRNA has an IC₅₀ of less than 0.02 nM. In embodiments, the dsRNA has an IC₅₀ of less than 0.01 nM. In embodiments, the IC₅₀ is determined as described herein in the Examples.

[0022] In some embodiments, the dsRNA has a single dose ED50 of less than about 10 mg/kg. In some embodiments, the dsRNA has a single dose ED50 of less than about 5 mg/kg. In embodiments, the EC50 is determined as described herein in the Examples.

[0023] In some embodiments, the dsRNA shows improved activity compared with AD-58632. In some embodiments, the dsRNA shows improved activity compared with AD-60489. In some embodiments, the dsRNA shows improved activity compared with AD-58632 and AD-60489.

[0024] In embodiments, the dsRNA is AD-60501, AD-60519, AD-60901, AD-60495, AD-60900, AD-60935, AD-60879, AD-61190, AD-61191, AD-60865, AD-60861, AD-60876, AD-61193, AD-60519, AD-60519, AD-60901, AD-60405, AD-60887, AD-60923, AD-60434, AD-60892, AD-60419, AD-60924, AD-60445, AD-60925, AD-60926, AD-60820, AD-60843, AD-60819, AD-61140, AD-61141, AD-61142, AD-60835, AD-60839, AD-61143, AD-61144, AD-61145, AD-61146, AD-60892, or AD-60419 (e.g., including the nucleotide sequence and/or one or more (e.g., all) of the modifications of the aforesaid dsRNAs). In embodiments, the dsRNA comprises an antisense strand that comprises, or consists of, an antisense sequence (and/or one or more (e.g., all) of the modifications)) selected from AD-60501, AD-60519, AD-60901, AD-60495, AD-60900, AD-60935, AD-60879, AD-61190, AD-61191, AD-60865, AD-60861, AD-60876, AD-61193, AD-60519, AD-60519, AD-60901, AD-60405, AD-60887, AD-60923, AD-60434, AD-60892, AD-60419, AD-60924, AD-60445, AD-60925, AD-60926, AD-60820, AD-60843, AD-60819, AD-61140, AD-61141, AD-61142, AD-60835, AD-60839, AD-61143, AD-61144, AD-61145, AD-61146, AD-60892, or AD-60419. In embodiments, the dsRNA comprises a sense strand that comprises, or consists of, a sense sequence (and/or one or more (e.g., all) of the modifications)) selected from AD-60501, AD-60519, AD-60901, AD-60495, AD-60900, AD-60935, AD-60879, AD-61190, AD-61191, AD-60865, AD-60861, AD-60876, AD-61193, AD-60519, AD-60519, AD-60901, AD-60405, AD-60887, AD-60923, AD-60434, AD-60892, AD-60419, AD-60924, AD-60445, AD-60925, AD-60926, AD-60820, AD-60843, AD-60819, AD-61140, AD-61141, AD-61142, AD-60835, AD-60839, AD-61143, AD-61144, AD-61145, AD-61146, AD-60892, or AD-60419.

[0025] In embodiments, a double-stranded ribonucleic acid (dsRNA) for inhibiting expression of ALAS1 is provided, wherein the dsRNA comprises (i) an antisense strand that comprises, or consists of, the sequence of UAAGAUGAGACACUCUUUCUGGU (SEQ ID NO: 4153) or UAAGAUGAGACACUCTUUCUGGU (SEQ ID NO: 4154) and/or (ii) a sense strand that comprises, or consists of, the sequence of CAGAAAGAGUGUCUCAUCUUA (SEQ ID NO: 4155). In embodiments, one or more nucleotides of the antisense strand and/or sense strand are modified as described herein.

[0026] In embodiments, a double-stranded ribonucleic acid (dsRNA) for inhibiting expression of ALAS1 is provided, wherein the dsRNA comprises (i) an antisense strand that comprises, or consists of, the antisense sequence of AD-60489 and/or (ii) a sense strand that comprises, or consists of, the sense sequence of AD-60489 (wherein the sense and/or antisense sequence includes one or more (e.g., all) of the modifications of the sense strand and/or antisense strand of AD-60489).

[0027] In embodiments, a double-stranded ribonucleic acid (dsRNA) for inhibiting expression of ALAS1 is provided, wherein the dsRNA comprises (i) an antisense strand that comprises, or consists of, the antisense sequence of AD-60519 and/or (ii) a sense strand that comprises, or consists of, the sense sequence of AD-60519 (wherein the sense and/or antisense sequence includes one or more (e.g., all) of the modifications of the sense strand and/or antisense strand of AD-60519).

[0028] In embodiments, a double-stranded ribonucleic acid (dsRNA) for inhibiting expression of ALAS1 is provided, wherein the dsRNA comprises (i) an antisense strand that comprises, or consists of, the antisense sequence of AD-61193 and/or (ii) a sense strand that comprises, or consists of, the sense sequence of AD-61193 (wherein the sense and/or antisense sequence includes one or more (e.g., all) of the modifications of the sense strand and/or antisense strand of AD-61193).

[0029] In embodiments, a double-stranded ribonucleic acid (dsRNA) for inhibiting expression of ALAS1 is provided, wherein the dsRNA comprises (i) an antisense strand that comprises, or consists of, the antisense sequence of AD-60819 and/or (ii) a sense sequence that comprises, or consists of, the sense sequence of AD-60819 (wherein the sense and/or antisense sequence includes one or more (e.g., all) of the modifications of the sense strand and/or antisense strand of AD-60819).

[0030] In embodiments, a dsRNA for inhibiting expression of ALAS1 is provided, wherein the dsRNA comprises (i) an antisense strand that comprises, or consists of, the antisense sequence of AD-60489, AD-60519, AD-61193, or AD-60819 (or a corresponding unmodified antisense sequence) and/or (ii) a sense strand that comprises, or consists of, the sense sequence of AD-60489, AD-60519, AD-61193, or AD-60819 (or a corresponding unmodified antisense sequence). In embodiments, the dsRNA comprises (i) an antisense strand that consists of the antisense sequence of AD-60489, AD-60519, AD-61193, or AD-60819 and/or (ii) a sense strand that consists of the sense sequence of AD-60489, AD-60519, AD-61193, or AD-60819, except that the antisense strand and/or sense strand of the dsRNA differs by 1, 2, or 3 nucleotides from the corresponding antisense and/or sense sequence of AD-60489, AD-60519, AD-61193, or AD-60819.

[0031] The sequences and modifications of AD-60489, AD-60519, AD-61193, and AD-60819 are shown in Table 44 below.

TABLE 44
Sequences and Modifications of AD-60489, AD-60519, AD-61193, AD-60819

| Target | | | | | |
|---|---|---|---|---|---|
| sites of | | | | | |
| antisense | | | | | |
| sequence | | | | Corresponding | Corresponding |
| on | Duplex | | Antisense Sequence | unmodified sense | unmodified antisense |
| NM_000688.4 | Name | Sense Sequence (5′-3′) | (5′-3′) | sequence | sequence |
| 871-893 | AD- | CfsasGfaAfaGfaGfUfG | usAfsaGfaUfgAfgAfcac | CAGAAAGAGUGUCUC | UAAGAUGAGACACUC |
| | 60489 | fuCfuCfaUfcUfuAfL96 | UfcUfuUfcUfgsgsu | AUCUUA (SEQ ID NO: | UUUCUGGU (SEQ ID |
| | | (SEQ ID NO: 4156) | (SEQ ID NO: 4157) | 4158) | NO: 4159) |
| 871-893 | AD- | csasgaaaGfaGfuGfuCfu | usAfsAfGfaUfgAfgAfc | CAGAAAGAGUGUCUC | UAAGAUGAGACACUC |
| | 60519 | CfaucuuaL96 | AfcUfcUfuUfcUfgsgsu | AUCUUA (SEQ ID NO: | UUUCUGGU (SEQ ID |
| | | (SEQ ID NO: 4160) | (SEQ ID NO: 4161) | 4162) | NO: 4163) |
| 871-893 | AD- | csasgaaaGfaGfuGfuC | usAfsaGfaUfgAfgAfc | CAGAAAGAGUGUCUC | UAAGAUGAGACACUC |
| | 61193 | fuCfaucuuaL96 | acUfcdTuUfcUfgsgsu | AUCUUA (SEQ ID NO: | TUUCUGGU (SEQ ID |
| | | (SEQ ID NO: 4164) | (SEQ ID NO: 4165) | 4166) | NO: 4167) |
| 873-895 | AD- | GfsasAfaGfaGfuGfuCf | asAfsgAfaGfaugAfgAfc | GAAAGAGUGUCUCAU | AAGAAGAUGAGACAC |
| | 60819 | uCfaucuuCfuuL96 | Afcucuuucsusg | CUUCUU (SEQ ID NO: | UCUUUCUG (SEQ ID |
| | | (SEQ ID NO: 4168) | (SEQ ID NO: 4169) | 4170) | NO: 4171) |

wherein c, a, g, u = 2′-OMe ribonucleosides; Af, Cf, G, Uf = 2′F ribonucleosides; S = phosphorothioate; L96 has the structure depicted in Table 1.

[0032] In embodiments, a double-stranded ribonucleic acid (dsRNA) for inhibiting expression of ALAS1 is provided, wherein the dsRNA comprises (i) an antisense strand that comprises, or consists of, the antisense sequence of AD-60489, AD-60519, or AD-61193 and/or (ii) a sense strand that comprises, or consists of, the sense sequence of AD-60489, AD-60519, or AD-61193 (including the nucleotide sequence and one or more (e.g., all) of the modifications of the sense strand and/or antisense strand of AD-60489, AD-60519, or AD-61193).

[0033] In embodiments, a double-stranded ribonucleic acid (dsRNA) for inhibiting expression of ALAS1 is provided, wherein the dsRNA is AD-60489, AD-60519, AD-61193, or AD-60819. In embodiments, a double-stranded ribonucleic acid (dsRNA) for inhibiting expression of ALAS1 is provided, wherein the dsRNA is AD-60489, AD-60519, or AD-61193 (e.g., including the nucleotide sequence and/or one or more (e.g., all) of the modifications of AD-60489, AD-60519, or AD-61193).

[0034] In embodiments, the dsRNA is, comprises, or consists of, AD-60489 (e.g., including the nucleotide sequence and/or one or more (e.g., all) of the modifications of AD-60489).

[0035] In embodiments, the dsRNA is, comprises, or consists of, AD-60519 (e.g., including the nucleotide sequence and/or one or more (e.g., all) of the modifications of AD-60519).

[0036] In embodiments, the dsRNA is, comprises, or consists of, AD-61193 (e.g., including the nucleotide sequence and/or one or more (e.g., all) of the modifications of AD-61193).

[0037] In embodiments, the dsRNA is, comprises, or consists of, AD-60819 (e.g., including the nucleotide sequence and/or one or more (e.g., all) of the modifications of AD-60819).

[0038] In embodiments, the dsRNA (e.g., AD-60489, AD-60519, AD-61193, AD-60819, or another dsRNA disclosed herein in any one of Tables 21 to 40) is effective to suppress the liver level of ALAS1 mRNA, e.g., to achieve silencing of at least 10%, 20%, 30%, 40%, 50%, 60%, 70%, or 80% (e.g., such that ALAS1 mRNA levels are decreased to 90% or less, 80% or less, 70% or less, 60% or less, 50% or less, 40% or less, 30% or less, or 20% or less of a control level of liver ALAS1 mRNA, e.g., the level in an untreated individual or group of individuals, e.g., an individual or group of individuals treated with PBS only). In embodiments, the effectiveness of the dsRNA in suppressing the liver level of ALAS1 mRNA is assessed using a non-human primate model, e.g., as described herein in the Examples.

[0039] In embodiments, the dsRNA (e.g., AD-60489, AD-60519, AD-61193, AD-60819, or another dsRNA disclosed herein in any one of Tables 21 to 40) is effective to suppress the circulating level of ALAS1 mRNA, e.g., to achieve silencing of at least 10%, 20%, 30%, 40%, 50%, 60%, 70%, or 80% (e.g., such that ALAS1 mRNA levels are decreased to 90% or less, 80% or less, 70% or less, 60% or less, 50% or less, 40% or less, 30% or less, or 20% or less of a control level of circulating ALAS1 mRNA, e.g., the level prior to treatment with the dsRNA, or the level in an untreated individual or group of individuals). In embodiments, the effectiveness of the dsRNA in suppressing the circulating level of ALAS1 mRNA is assessed using a non-human primate model, e.g., as described herein in the Examples. In embodiments, the circulating level of ALAS1 mRNA is assessed using a circulating extracellular RNA detection (cERD) assay, e.g., as described herein or in Sehgal, A. et al. Quantitation of tissue-specific target gene modulation using circulating RNA (Poster presented on Feb. 9, 2012 at the Keystone Gene Silencing by small RNAs symposium (Vancouver, Feb. 7-12, 2012) or Sehgal, A. et al. Tissue-specific gene silencing monitored in circulating RNA, RNA, 20: 1-7, published online Dec. 19, 2013.

[0040] The cERD method can be applied to any appropriate biological sample. In embodiments, the circulating level of ALAS1 mRNA is assessed using a blood sample, e.g., a serum sample. In embodiments, the circulating level of ALAS1 mRNA is assessed using a urine sample.

[0041] In embodiments, the dsRNA is a derivative of AD-60489 that is disclosed herein, e.g., in any one of the tables herein. In embodiments, the dsRNA shows improved activity compared with AD-60489. In some such embodiments, the dsRNA is AD-60519.

[0042] In embodiments, the dsRNA is a derivative of AD-58632 that is disclosed herein, e.g., in any one of the tables herein. In embodiments, the dsRNA shows improved activity compared with AD-58632.

[0043] In embodiments, improved activity is indicated by a lower IC50, e.g., as determined based on in vitro assays, e.g., as described herein, e.g., in the Examples.

[0044] In embodiments, improved activity is indicated by a lower effective dose. The effective dose may be determined based on the administration of a single dose or multiple repeated doses.

[0045] In embodiments, the effective dose is determined based on the single dose ED50. In embodiments, the effective dose or the single dose ED50 is determined based on an in vivo assay. In embodiments, the in vivo assay is conducted in a non-human animal, e.g., in a rat, in a non-human primate, or in a mouse.

[0046] In embodiments, the effective dose is determined based on the dose required to obtain a reduction of in a level of ALAS1 mRNA (e.g., a liver level of ALAS1 mRNA and/or a circulating level of ALAS1 mRNA), e.g., as described herein in the Examples. In embodiments, circulating mRNA is assessed using the cERD assay.

[0047] In embodiments, the effective dose is determined based on the dose required to obtain a reduction of a level (e.g., a urine and/or plasma level) of ALA and/or PBG.

[0048] In embodiments, the effective dose is determined based on the dose required to obtain a particular treatment effect described herein, e.g., prevention or reduction of symptoms associated with a porphyria.

[0049] In embodiments, improved activity is indicated by the achievement of a higher liver level of the dsRNA. In embodiments, a higher liver level is obtained after a single dose of dsRNA (e.g., a dose of 1, 2.5, 3, 5, or 10 mg/kg). In embodiments, a higher liver level is obtained after multiple doses of dsRNA have been administered (e.g., 2-10 daily or weekly doses of 1, 2.5, 3, 5, or 10 mg/kg).

[0050] In one embodiment, the iRNA encompasses a dsRNA having an RNA strand (the antisense strand) having a region that is substantially complementary to a portion of an ALAS1 mRNA, e.g., a human ALAS1 mRNA (e.g., a human ALAS1 mRNA as provided in SEQ ID NO:1 or SEQ ID NO:382).

[0051] In one embodiment, an iRNA for inhibiting expression of an ALAS1 gene includes at least two sequences that are complementary to each other. The iRNA includes a sense strand having a first sequence and an antisense strand having a second sequence. The antisense strand includes a nucleotide sequence that is substantially complementary to at least part of an mRNA encoding an ALAS1 transcript, and the region of complementarity is 30 nucleotides or less, and at least 15 nucleotides in length. Generally, the iRNA is 19 to 24 nucleotides in length.

[0052] In some embodiments, the iRNA is 19-21 nucleotides in length. In some embodiments, the iRNA is 19-21 nucleotides in length and is in a lipid formulation, e.g. a lipid nanoparticle (LNP) formulation (e.g., an LNP11 formulation).

[0053] In some embodiments, the iRNA is 21-23 nucleotides in length. In some embodiments, the iRNA is 21-23 nucleotides in length and is in the form of a conjugate, e.g., conjugated to one or more GalNAc derivatives as described herein.

[0054] In some embodiments the iRNA is from about 15 to about 25 nucleotides in length, and in other embodiments the iRNA is from about 25 to about 30 nucleotides in length. An iRNA targeting ALAS1, upon contact with a cell expressing ALAS1, inhibits the expression of an ALAS1 gene by at least 10%, at least 20%, at least 25%, at least 30%, at least 35% or at least 40% or more, such as when assayed by a method as described herein. In one embodiment, the iRNA targeting ALAS1 is formulated in a stable nucleic acid lipid particle (SNALP).

[0055] In one embodiment, an iRNA (e.g., a dsRNA) featured herein includes a first sequence of a dsRNA that is selected from the group consisting of the sense sequences of Tables 21 to 40 and a second sequence that is selected from the group consisting of the corresponding antisense sequences of Tables 21 to 40.

[0056] The iRNA molecules featured herein can include naturally occurring nucleotides or can include at least one modified nucleotide. In embodiments, the at least one modified nucleotide include one or more of a modification on the nucleotide chosen from the group consisting of a locked nucleic acid (LNA), an acyclic nucleotide, a hexitol or hexose nucleic acid (HNA), a cyclohexene nucleic acid (CeNA), 2′-methoxyethyl, 2′-O-alkyl, 2′-O-allyl, 2′-C-allyl, 2′-fluoro, 2′-deoxy, 2′-hydroxyl, or any combination thereof. In one embodiment, the at least one modified nucleotide includes, but is not limited to a 2′-O-methyl modified nucleotide, 2′-fluoro modified nucleotide, a nucleotide having a 5′-phosphorothioate group, and a terminal nucleotide linked to a ligand, e.g., an N-acetylgalactosamine (GalNAc) or a cholesteryl derivative. Alternatively, the modified nucleotide may be chosen from the group of: a 2′-deoxy-2′-fluoro modified nucleotide, a 2′-deoxy-modified nucleotide, a locked nucleotide, an acyclic nucleotide, an abasic nucleotide, 2′-amino-modified nucleotide, 2′-alkyl-modified nucleotide, morpholino nucleotide, a phosphoramidate, and a non-natural base comprising nucleotide. Such a modified sequence can be based, e.g., on a first sequence of said iRNA selected from the group consisting of the sense sequences of disclosed in Tables 21-40, and a second sequence selected from the group consisting of the corresponding antisense sequences disclosed in Tables 21-40.

[0057] In one embodiment, an iRNA as described herein targets a wildtype ALAS1 RNA transcript variant, and in another embodiment, the iRNA targets a mutant transcript (e.g., an ALAS1 RNA carrying an allelic variant). For example, an iRNA featured in the invention can target a polymorphic variant, such as a single nucleotide polymorphism (SNP), of ALAS1. In another embodiment, the iRNA targets both a wildtype and a mutant ALAS1 transcript. In yet another embodiment, the iRNA targets a particular transcript variant of ALAS1 (e.g., human ALAS1 variant 1). In yet another embodiment, the iRNA agent targets multiple transcript variants (e.g., both variant 1 and variant 2 of human ALAS1).

[0058] In one embodiment, an iRNA featured in the invention targets a non-coding region of an ALAS1 RNA transcript, such as the 5′ or 3′ untranslated region of a transcript.

[0059] In some embodiments, an iRNA as described herein is in the form of a conjugate, e.g., a carbohydrate conjugate, which may serve as a targeting moiety and/or ligand, as described herein. In one embodiment, the conjugate is attached to the 3′ end of the sense strand of the dsRNA. In some embodiments, the conjugate is attached via a linker, e.g., via a bivalent or trivalent branched linker.

[0060] In some embodiments, the conjugate comprises one or more N-acetylgalactosamine (GalNAc) derivatives. Such a conjugate is also referred to herein as a GalNAc conjugate. In some embodiments, the conjugate targets the RNAi agent to a particular cell, e.g., a liver cell, e.g., a hepatocyte. The GalNAc derivatives can be attached via a linker, e.g., a bivalent or trivalent branched linker. In particular embodiments, the conjugate is

[chemical structure]

[0061] In some embodiments, the RNAi agent is attached to the carbohydrate conjugate via a linker, e.g., a linker as shown in the following schematic, wherein X is O or S

[chemical structure]

[0062] In some embodiments, X is O. In some embodiments, X is S.

[0063] In some embodiments, the RNAi agent is conjugated to L96 as defined in Table 1 and shown below

[chemical structure]

[0064] In one embodiment, the dsRNA has one, two, three, four, five, six, seven, eight, nine, ten, eleven, twelve, thirteen, fourteen, fifteen, sixteen or all of the following:

[0065] (i) is chemically synthesized, e.g., is synthesized by solid phase oligonucleotide synthesis;

[0066] (ii) all the nucleotides in the dsRNA are modified, e.g., all the nucleotides are 2′-OMe or 2′-F modified, or a combination of 2′-OMe and 2′-F modified;

[0067] (iii) all nucleotides are connected through 3′-5′ phosphodiester linkages;

[0068] (iv) the sense strand comprises or consists of 21 nucleotides;

[0069] (v) the antisense sense strand comprises or consists of 23 nucleotides;

[0070] (vi) has a blunt-end at the 3′-end of sense strand;

[0071] (vii) has a 3′-overhang, e.g., has a two-nucleotide overhang, at the 3′-end of the antisense strand;

[0072] (viii) is covalently attached to a ligand containing three N-acetylgalactosamine (GalNAc) moieties;

[0073] (ix) the 3′-end of the sense strand is conjugated to the triantennary GalNAc moiety (e.g., referred to herein as L96 as defined in Table 1). In one embodiment, the 3′-end is linked to the triantennary GalNAc moiety through a phosphodiester linkage;

[0074] (x) has an antisense strand that comprises one or more (e.g., four) phosphorothioate linkages. In one embodiment, the phosphorothioate linkages are located at the 3′ end and at the 5′ end of the antisense strand. In one embodiment, two phosphorothioate linkages are located at the 3′ end and two phosphorothioate linkages are located at the 5′ end of the antisense strand;

[0075] (xi) has a sense strand that comprises one or more (e.g., two) phosphorothioate linkages. In one embodiment, the one or more (e.g., two) phosphorothioate linkages are located at the 5′ end of the sense strand;

[0076] (xii) 21 nucleotides of the sense strand hybridize to the complementary 21 nucleotides of the antisense strand;

[0077] (xiii) forms 21 nucleotide base pairs and a two-base overhang at the 3′-end of the antisense strand;

[0078] (xiv) comprises, or consists of, a sense and antisense strand having the sequence of AD-60519;

[0079] (xv) has a sense strand with 10, 12, 14, 16, 18, 19, 20 or all of the modifications of the sense strand of AD-60519;

[0080] (xvi) has an antisense strand with 10, 12, 14, 16, 18, 19, 20 or all of the modifications of the antisense strand of AD-60519; or

[0081] (xvii) has the duplex sequence and all the modifications of AD-60519.

[0082] In embodiments, the dsRNA is in the form of a conjugate having the following structure (also referred to herein as AD-60519 or ALN-60519) (SEQ ID NOS 5238-5239, respectively, in order of appearance):

[chemical structure]

[0083] In an aspect provided herein is a composition, e.g., a pharmaceutical composition, that includes one or more of the iRNAs described herein and a pharmaceutically acceptable carrier or delivery vehicle. In one embodiment, the composition is used for inhibiting the expression of an ALAS1 gene in an organism, generally a human subject. In one embodiment, the composition is used for treating a porphyria, e.g., AIP.

[0084] In one aspect, an iRNA provided herein is a double-stranded ribonucleic acid (dsRNA) for inhibiting expression of ALAS1, wherein said dsRNA comprises a sense strand and an antisense strand 15-30 base pairs in length and the antisense strand is complementary to at least 15 contiguous nucleotides of SEQ ID NO: 1 or 382.

[0085] In a further aspect, an iRNA provided herein is a double stranded RNAi (dsRNA) comprising a sense strand complementary to an antisense strand, wherein said antisense strand comprises a region of complementarity to an ALAS1 RNA transcript, wherein each strand has about 14 to about 30 nucleotides, wherein said double stranded RNAi agent is represented by formula (III):

sense: 5′nₚ-Nₐ—(X X X)ᵢ—N_{b}—Y Y Y—N_{b}—(Z Z Z)ⱼ—Nₐ-n_{q}3′

antisense: 3′nₚ′-Nₐ′—(X′X′X′)ₖ—N_{b}′—Y′Y′Y′—N_{b}′—(Z′Z′Z′)ₗ—Nₐ′-n_{q}′5′ (III)
[0086] wherein:
[0087] j, k, and 1 are each independently 0 or 1;
[0088] p, p′, q, and q′ are each independently 0-6;
[0089] each Nₐ and Nₐ′ independently represents an oligonucleotide sequence comprising 0-25 nucleotides which are either modified or unmodified or combinations thereof, each sequence comprising at least two differently modified nucleotides;
[0090] each N_{b} and N_{b}′ independently represents an oligonucleotide sequence comprising 0-10 nucleotides which are either modified or unmodified or combinations thereof;
[0091] each nₚ, nₚ′, n_{q}, and n_{q}′ independently represents an overhang nucleotide;
[0092] XXX, YYY, ZZZ, X′X′X′, Y′Y′Y′, and Z′Z′Z′ each independently represent one motif of three identical modifications on three consecutive nucleotides;
[0093] modifications on N_{b} differ from the modification on Y and modifications on N_{b}′ differ from the modification on Y′.

[0094] In embodiments, the sense strand is conjugated to at least one ligand.

[0095] In embodiments, i is 1; j is 1; or both i and j are 1.

[0096] In embodiments, k is 1; l is 1; or both k and l are 1.

[0097] In embodiments, XXX is complementary to X′X′X′, YYY is complementary to Y′Y′Y′, and ZZZ is complementary to Z′Z′Z′.

[0098] In embodiments, the Y′Y′Y′ motif occurs at the 11, 12 and 13 positions of the antisense strand from the 5′-end.

[0099] In embodiments, the Y′ is 2′-O-methyl.

[0100] In embodiments, the duplex region is 15-30 nucleotide pairs in length.

[0101] In embodiments, the duplex region is 17-23 nucleotide pairs in length.

[0102] In embodiments, the duplex region is 19-21 nucleotide pairs in length.

[0103] In embodiments, the duplex region is 21-23 nucleotide pairs in length.

[0104] In embodiments, the modification on the nucleotide is selected from the group consisting of a locked nucleic acid (LNA), an acyclic nucleotide, a hexitol or hexose nucleic acid (HNA), a cyclohexene nucleic acid (CeNA), 2′-methoxyethyl, 2′-O-alkyl, 2′-O-allyl, 2′-C-allyl, 2′-fluoro, 2′-deoxy, 2′-hydroxyl, and any combination thereof.

[0105] In embodiments, the modifications on the nucleotides are selected from the group consisting of LNA, HNA, CeNA, 2′-methoxyethyl, 2′-O-alkyl, 2′-O-allyl, 2′-C-allyl, 2′-fluoro, 2′-deoxy, 2′-hydroxyl, and combinations thereof.

[0106] In embodiments, the modifications on the nucleotides are 2′-O-methyl, 2′-fluoro or both.

[0107] In embodiments, the ligand comprises a carbohydrate.

[0108] In embodiments, the ligand is attached via a linker.

[0109] In embodiments, the linker is a bivalent or trivalent branched linker.

[0110] In embodiments, the ligand is

[chemical structure]

[0111] In embodiments, the ligand and linker are as shown in Formula XXIV:

[chemical structure]

[0112] In embodiments, the ligand is attached to the 3′ end of the sense strand.

[0113] In embodiments, the dsRNA consists of or comprises a nucleotide sequence selected from the group of sequences provided in Tables 21-40.

[0114] In a further aspect, an iRNA provided herein is a double-stranded ribonucleic acid (dsRNA) for inhibiting expression of ALAS1, wherein said dsRNA comprises a sense strand and an antisense strand, the antisense strand comprising a region of complementarity to an ALAS1 RNA transcript, which antisense strand comprises at least 15 contiguous nucleotides differing by no more than 3 nucleotides from one of the antisense sequences listed in any one of Tables 21-40. In embodiments, the nucleotides of the antisense strand have fewer modifications, more modifications, or different modifications compared with the antisense sequences listed in any one of Tables 21-40.

[0115] In embodiments, the sense and antisense sequences are those of a duplex disclosed herein that suppresses ALAS1 mRNA expression by at least 50%, 60%, 70%, 80%, 85% or 90%, e.g., as assessed using an assay disclosed in the Examples provided herein.

[0116] In embodiments, ALAS1 mRNA expression is assessed based on an ALAS1 mRNA level in the liver, e.g., as assessed using a liver biopsy sample. In embodiments, ALAS1 mRNA expression is assessed based on an ALAS1 mRNA level in a biological fluid, e.g., blood, serum, plasma, cerebrospinal fluid, or urine. In embodiments, ALAS1 mRNA expression is assessed using a circulating extracellular RNA detection (cERD) assay, e.g., a cERD assay as described herein or in Sehgal, A. et al. Quantitation of tissue-specific target gene modulation using circulating RNA (Poster presented on Feb. 9, 2012 at the Keystone Gene Silencing by small RNAs symposium (Vancouver, Feb. 7-12, 2012) or Sehgal, A. et al. Tissue-specific gene silencing monitored in circulating RNA, RNA, 20: 1-7, published online Dec. 19, 2013.

[0117] In some embodiments, the dsRNA comprises at least one modified nucleotide.

[0118] In some embodiments, at least one of the modified nucleotides is chosen from the group consisting of: a 2′-O-methyl modified nucleotide, a nucleotide comprising a 5′-phosphorothioate group, and a terminal nucleotide linked to a cholesteryl derivative or dodecanoic acid bisdecylamide group.

[0119] In some embodiments, the modified nucleotide is chosen from the group consisting of: a 2′-deoxy-2′-fluoro modified nucleotide, a 2′-deoxy-modified nucleotide, a locked nucleotide, an acyclic nucleotide, an abasic nucleotide, 2′-amino-modified nucleotide, 2′-alkyl-modified nucleotide, morpholino nucleotide, a phosphoramidate, and a non-natural base comprising nucleotide.

[0120] In some embodiments, the region of complementarity is at least 17 nucleotides in length.

[0121] In some embodiments, the region of complementarity is between 19 and 21 nucleotides in length.

[0122] In some embodiments, the region of complementarity is 19 nucleotides in length.

[0123] In some embodiments, each strand is no more than 30 nucleotides in length.

[0124] In some embodiments, at least one strand comprises a 3′ overhang of at least 1 nucleotide. In embodiments, the antisense strand comprises a 3′ overhang of at least 1 nucleotide.

[0125] In some embodiments, at least one strand comprises a 3′ overhang of at least 2 nucleotides. In embodiments, the antisense strand comprises a 3′ overhang.of at least 2 nucleotides. In embodiments, the antisense strand comprises a 3′ overhang.of 2 nucleotides.

[0126] In some embodiments, a dsRNA described herein further comprises a ligand.

[0127] In some embodiments, the ligand is a GalNAc ligand.

[0128] In some embodiments, the ligand targets the dsRNA to hepatocytes.

[0129] In some embodiments, the ligand is conjugated to the 3′ end of the sense strand of the dsRNA.

[0130] In some embodiments, the region of complementarity consists of an antisense sequence selected from the antisense sequences listed in Tables 21-40, or a corresponding antisense sequence in which some or all of the nucleotides are unmodified. In embodiments, the region of complementarity consists of the sequence UAAGAUGAGACACUCUUUCUGGU (SEQ ID NO: 4153) or UAAGAUGAGACACUCTUUCUGGU (SEQ ID NO: 4154). In some embodiments, the region of complementarity consists of the antisense sequence of the duplex AD-60489. In some embodiments, the region of complementarity consists of the antisense sequence of the duplex AD-60519.

[0131] In embodiments, the region of complementarity consists of an antisense sequence selected from a duplex disclosed herein that suppresses ALAS1 mRNA expression by at least 50%, 60%, 70%, 80%, 85% or 90%, e.g., as assessed using an assay disclosed in the Examples provided herein.

[0132] In some embodiments, the dsRNA comprises a sense strand consisting of a sense strand sequence selected from Tables 21-40, and an antisense strand consisting of an antisense sequence selected from Tables 21-40. In embodiments, the dsRNA comprises a pair of corresponding sense and antisense sequences selected from those of the duplexes disclosed in Tables 21-40.

[0133] In one aspect, the invention provides a cell containing at least one of the iRNAs (e.g., dsRNAs) featured herein. The cell is generally a mammalian cell, such as a human cell. In some embodiments, the cell is an erythroid cell. In other embodiments, the cell is a liver cell (e.g., a hepatocyte).

[0134] In an aspect provided herein is a pharmaceutical composition for inhibiting expression of an ALAS1 gene, the composition comprising an iRNA (e.g., a dsRNA) described herein.

[0135] In embodiments of the pharmaceutical compositions described herein, the iRNA (e.g., dsRNA) is administered in an unbuffered solution. In embodiments, the unbuffered solution is saline or water, e.g., water for injection.

[0136] In embodiments, the pharmaceutical composition comprises AD-60519 and water for injection. In embodiments, the composition comprises about 100 to 300 mg/mL, e.g., 200 mg/mL, of AD-60519. In embodiments, the composition has a pH of 6.0-7.5, e.g., about 7.0. In embodiments, the composition is for subcutaneous injection. In embodiments, the pharmaceutical composition is packaged in a container (e.g., a glass vial, e.g., a 2 mL glass vial,) at a volume of about 0.3 to 1 mL, e.g., 0.55 mL. In embodiments, the pharmaceutical composition is ALN-AS1 as described herein in the examples.

[0137] In embodiments of the pharmaceutical compositions described herein, the iRNA (e.g., dsRNA is administered with a buffer solution. In embodiments, the buffer solution comprises acetate, citrate, prolamine, carbonate, or phosphate or any combination thereof. In embodiments, the buffer solution is phosphate buffered saline (PBS).

[0138] In embodiments of the pharmaceutical compositions described herein, the iRNA (e.g., dsRNA) is targeted to hepatocytes.

[0139] In embodiments of the pharmaceutical compositions described herein, the composition is administered intravenously.

[0140] In embodiments of the pharmaceutical compositions described herein, the composition is administered subcutaneously.

[0141] In embodiments, a pharmaceutical composition comprises an iRNA (e.g., a dsRNA) described herein that comprises a ligand (e.g., a GalNAc ligand) that targets the iRNA (e.g., dsRNA) to hepatocytes.

[0142] In embodiments, a pharmaceutical composition comprises an iRNA (e.g., a dsRNA) described herein that comprises a ligand (e.g., a GalNAc ligand), and the pharmaceutical composition is administered subcutaneously. In embodiments, the ligand targets the iRNA (e.g., dsRNA) to hepatocytes.

[0143] In certain embodiments, a pharmaceutical composition, e.g., a composition described herein, includes a lipid formulation. In some embodiments, the RNAi agent is in a LNP formulation, e.g., a MC3 formulation. In some embodiments, the LNP formulation targets the RNAi agent to a particular cell, e.g., a liver cell, e.g., a hepatocyte. In embodiments, the lipid formulation is a LNP11 formulation. In embodiments, the composition is administered intravenously.

[0144] In another embodiment, the pharmaceutical composition is formulated for administration according to a dosage regimen described herein, e.g., not more than once every four weeks, not more than once every three weeks, not more than once every two weeks, or not more than once every week. In another embodiment, the administration of the pharmaceutical composition can be maintained for a month or longer, e.g., one, two, three, or six months, or one year or longer.

[0145] In another embodiment, a composition containing an iRNA featured in the invention, e.g., a dsRNA targeting ALAS1, is administered with a non-iRNA therapeutic agent, such as an agent known to treat a porphyria (e.g., AIP), or a symptom of a porphyria (e.g., pain). In another embodiment, a composition containing an iRNA featured in the invention, e.g., a dsRNA targeting AIP, is administered along with a non-iRNA therapeutic regimen, such as hemin or glucose (e.g., glucose infusion (e.g., IV glucose)). For example, an iRNA featured in the invention can be administered before, after, or concurrent with glucose, dextrose, or a similar treatment that serves to restore energy balance (e.g., total parenteral nutrition). An iRNA featured in the invention can also be administered before, after, or concurrent with the administration of a heme product (e.g., hemin, heme arginate, or heme albumin), and optionally also in combination with a glucose (e.g. IV glucose) or the like.

[0146] Typically, glucose administered for the treatment of a porphyria is administered intravenously (IV). Administration of glucose intravenously is referred to herein as “IV glucose.” However, alternative embodiments in which glucose is administered by other means are also encompassed.

[0147] In one embodiment, an ALAS1 iRNA is administered to a patient, and then the non-iRNA agent or therapeutic regimen (e.g., glucose and/or a heme product) is administered to the patient (or vice versa). In another embodiment, an ALAS1 iRNA and the non-iRNA therapeutic agent or therapeutic regimen are administered at the same time.

[0148] In an aspect provided herein is a method of inhibiting ALAS1 expression in a cell, the method comprising: (a) introducing into the cell an iRNA (e.g. a dsRNA) described herein and (b) maintaining the cell of step (a) for a time sufficient to obtain degradation of the mRNA transcript of an ALAS1 gene, thereby inhibiting expression of the ALAS1 gene in the cell.

[0149] In an aspect provided herein is a method for reducing or inhibiting the expression of an ALAS1 gene in a cell (e.g., an erythroid cell or a liver cell, such as, e.g., a hepatocyte). The method includes:
[0150] (a) introducing into the cell a double-stranded ribonucleic acid (dsRNA), wherein the dsRNA includes at least two sequences that are complementary to each other. The dsRNA has a sense strand having a first sequence and an antisense strand having a second sequence; the antisense strand has a region of complementarity that is substantially complementary to at least a part of an mRNA encoding ALAS1, and where the region of complementarity is 30 nucleotides or less, i.e., 15-30 nucleotides in length, and generally 19-24 nucleotides in length, and where the dsRNA upon contact with a cell expressing ALAS1, inhibits expression of an ALAS1 gene by at least 10%, e.g., at least 20%, at least 30%, at least 40% or more; and
[0151] (b) maintaining the cell of step (a) for a time sufficient to obtain degradation of the mRNA transcript of the ALAS1 gene, thereby reducing or inhibiting expression of an ALAS1gene in the cell.

[0152] In embodiments of the foregoing methods of inhibiting ALAS1 expression in a cell, the cell is treated ex vivo, in vitro, or in vivo. In embodiments, the cell is a hepatocyte.

[0153] In embodiments, the cell is present in a subject in need of treatment, prevention and/or management of a disorder related to ALAS1 expression.

[0154] In embodiments, the disorder is a porphyria. In embodiments, the porphyria is acute intermittent porphyria or ALA-dehydratase deficiency porphyria.

[0155] In embodiments, the porphyria is a hepatic porphyria, e.g., a porphyria selected from acute intermittent porphyria (AIP) hereditary coproporphyria (HCP), variegate porphyria (VP), ALA deyhdratase deficiency porphyria (ADP), and hepatoerythropoietic porphyria. In embodiments, the porphyria is a homozygous dominant hepatic porphyria (e.g., homozygous dominant AIP, HCP, or VP) or hepatoerythropoietic porphyria. In embodiments, the porphyria is a dual porphyria.

[0156] In embodiments, the expression of ALAS1 is inhibited by at least 30%.

[0157] In embodiments, the iRNA (e.g., dsRNA) has an IC₅₀ in the range of 0.01-1 nM.

[0158] In certain embodiments, the cell (e.g., the hepatocyte) is a mammalian cell (e.g., a human, non-human primate, or rodent cell).

[0159] In one embodiment, the cell is treated ex vivo, in vitro, or in vivo (e.g., the cell is present in a subject (e.g., a patient in need of treatment, prevention and/or management of a disorder related to ALAS1 expression).

[0160] In one embodiment, the subject is a mammal (e.g., a human) at risk, or diagnosed with a porphyria, e.g., X-linked sideroblastic anemia (XLSA), ALA deyhdratase deficiency porphyria (ADP or Doss porphyria), acute intermittent porphyria (AIP), congenital erythropoietic porphyria (CEP), prophyria cutanea tarda (PCT), hereditary coproporphyria (coproporphyria, or HCP), variegate porphyria (VP), erythropoietic protoporphyria (EPP), or transient erythroporphyria of infancy. In some embodiments, the disorder is an acute hepatic porphyria, e.g., ALA deyhdratase deficiency porphyria (ADP), AIP, HCP, or VP. In specific embodiments, the disorder is ALA deyhdratase deficiency porphyria (ADP) or AIP.

[0161] In embodiments, the porphyria is a hepatic porphyria, e.g., a porphyria selected from acute intermittent porphyria (AIP) hereditary coproporphyria (HCP), variegate porphyria (VP), ALA deyhdratase deficiency porphyria (ADP), and hepatoerythropoietic porphyria. In embodiments, the porphyria is a homozygous dominant hepatic porphyria (e.g., homozygous dominant AIP, HCP, or VP) or hepatoerythropoietic porphyria, In embodiments, the porphyria is a dual porphyria.

[0162] In one embodiment, the dsRNA introduced reduces or inhibits expression of an ALAS1 gene in the cell.

[0163] In one embodiment, the dsRNA introduced reduces or inhibits expression of an ALAS1 gene, or the level of one or more porphyrins or porphyrin precursors (e.g., δ-aminolevulinic acid (ALA), porphopilinogen (PBG), hydroxymethylbilane (HMB), uroporphyrinogen I or III, coproporphyrinogen I or III, protoporphrinogen IX, and protoporphyrin IX) or porphyrin products or metabolites, by at least 5%, 10%, 15%, 20%, 25%, 30%, 35%, 40%, 45%, 50% or more compared to a reference, (e.g., an untreated cell or a cell treated with a non-targeting control dsRNA). Without being bound by theory, ALAS1 is the first enzyme of the porphyrin pathway. Thus, reducing expression of the ALAS1 gene is likely to reduce the level of one or more porphyrin precursors, porphyrins or porphyrin products or metabolites.

[0164] In other aspects, the invention provides methods for treating, preventing or managing pathological processes related to ALAS1 expression (e.g., pathological processes involving porphyrins, porphyrin precuorsors, or defects in the porphyrin pathway, such as, for example, porphyrias). In one embodiment, the method includes administering to a subject, e.g., a patient in need of such treatment, prevention or management, an effective (e.g., a therapeutically or prophylactically effective) amount of one or more of the iRNAs featured herein.

[0165] In an aspect provided herein is a method of treating and/or preventing a disorder related to ALAS1 expression comprising administering to a subject in need of such treatment a therapeutically effective amount of an iRNA (e.g., a dsRNA) described herein, or a composition comprising an iRNA (e.g., a dsRNA) described herein.

[0166] In an aspect provided herein is a method of treating and/or preventing a porphyria comprising administering to a subject in need of such treatment a double-stranded ribonucleic acid (dsRNA), wherein said dsRNA comprises a sense strand and an antisense strand 15-30 base pairs in length and the antisense strand is complementary to at least 15 contiguous nucleotides of SEQ ID NO:1 or SEQ ID NO:382.

[0167] In one embodiment, subject (e.g., the patient) has a porphyria. In another embodiment, the subject (e.g., patient) is at risk for developing a porphyria. In some embodiments, administration of the iRNA targeting ALAS1 alleviates or relieves the severity of at least one symptom of a disorder related to ALAS1 in the patient.

[0168] In one embodiment, the subject is a mammal (e.g., a human) at risk, or that has been diagnosed with, a disorder related to ALAS1 expression, e.g., a porphyria, e.g., X-linked sideroblastic anemia (XLSA), ALA deyhdratase deficiency porphyria (Doss porphyria), acute intermittent porphyria (AIP), congenital erythropoietic porphyria (CEP), prophyria cutanea tarda (PCT), hereditary coproporphyria (coproporphyria, or HCP), variegate porphyria (VP), erythropoietic protoporphyria (EPP), or transient erythroporphyria of infancy. In a further embodiment, the porphyria is an acute hepatic porphyria, e.g., ALA deyhdratase deficiency porphyria (ADP), AIP, HCP, or VP. In some such embodiments, the disorder is ALA deyhdratase deficiency porphyria (ADP) or AIP.

[0169] In embodiments the subject has, or is at risk for developing, a porphyria. In embodiments, the porphyria is a hepatic porphyria, e.g., a porphyria selected from acute intermittent porphyria (AIP) hereditary coproporphyria (HCP), variegate porphyria (VP), ALA deyhdratase deficiency porphyria (ADP), and hepatoerythropoietic porphyria. In embodiments, the porphyria is a homozygous dominant hepatic porphyria (e.g., homozygous dominant AIP, HCP, or VP) or hepatoerythropoietic porphyria, In embodiments, the porphyria is a dual porphyria.

[0170] In embodiments, a porphyria, a symptom of porphyria, a prodrome, or an attack of porphyria is induced by exposure to a precipitating factor, as described herein. In some embodiments, the precipitating factor is a chemical exposure. In some embodiments, the precipitating factor is a drug, e.g., a prescription drug or an over the counter drug. In some embodiments, the precipitating factor is the menstrual cycle, e.g., a particular phase of the menstrual cycle, e.g., the luteal phase.

[0171] In embodiments, the iRNA (e.g., dsRNA) or composition comprising the iRNA is administered after an acute attack of porphyria.

[0172] In embodiments, the iRNA (e.g., dsRNA) or composition comprising the iRNA is administered during an acute attack of porphyria.

[0173] In embodiments, the iRNA (e.g., dsRNA) or composition comprising the iRNA is administered prophylactically to prevent an acute attack of porphyria.

[0174] In embodiments, the iRNA (e.g., dsRNA) is formulated as an LNP formulation.

[0175] In embodiments, the iRNA (e.g., dsRNA) is in the form of a GalNAc conjugate.

[0176] In embodiments, iRNA (e.g., dsRNA) is administered at a dose of 0.05-50 mg/kg.

[0177] In embodiments, the iRNA (e.g., dsRNA) is administered at a concentration of 0.01 mg/kg-5 mg/kg bodyweight of the subject.

[0178] In embodiments, the iRNA (e.g., dsRNA) is formulated as an LNP formulation and is administered at a dose of 0.05-5 mg/kg.

[0179] In embodiments, the iRNA (e.g., dsRNA) is in the form of a GalNAc conjugate and is administered at a dose of 0.5-50 mg/kg. In certain embodiments, the iRNA in the GalNAc conjugate is administered at a dose of less than 10 mg/kg (e.g., 5 mg/kg or less) e.g., once per week; e.g., a dose of 1 mg/kg or less, 2.5 mg/kg or less, or 5 mg/kg or less, e.g., once per week. In one embodiment, iRNA in the GalNAc conjugate is administered at a dose of about 2.5 mg/kg or less, e.g., once per week. In one embodiment, the administration of the iRNA in the GalNAc conjugate is subcutaneous.

[0180] In embodiments, the iRNA (e.g., dsRNA) is in the form of a GalNAc conjugate and is administered, e.g., subcutaneously, at a dose of 0-5 mg/kg, e.g. 0-2.5 mg/kg or 1-2.5 mg/kg. In embodiments, the iRNA is administered weekly. In embodiments, the iRNA is administered as a composition comprising the iRNA and water for injection. In embodiments, the iRNA is AD-60519. In embodiments, the composition comprises the iRNA, e.g., AD-60519, at a concentration of about 200 mg/mL.

[0181] In embodiments, the method decreases a level of a porphyrin or a porphyrin precursor in the subject.

[0182] In embodiments, the level is decreased by at least 10%, 20%, 30%, 40%, 50%, 60%, 70%, 80%, or 90%. In an embodiment, the level is decreased by at least 30%.

[0183] In embodiments, the porphyrin precursor is δ-aminolevulinic acid (ALA) or porphopilinogen (PBG).

[0184] In embodiments, the iRNA (e.g., dsRNA) has an IC₅₀ in the range of 0.01-1 nM.

[0185] In embodiments, a method described herein
[0186] (i) ameliorates a symptom associated with an ALAS1 related disorder (e.g., a porphyria)
[0187] (ii) inhibits ALAS1 expression in the subject (e.g., as assessed using the cERD assay),
[0188] (iii) decreases a level of a porphyrin precursor (e.g., ALA or PBG) or a porphyrin in the subject,
[0189] (iv) decreases frequency of acute attacks of symptoms associated with a porphyria in the subject, or
[0190] (v) decreases incidence of acute attacks of symptoms associated with a porphyria in the subject when the subject is exposed to a precipitating factor (e.g., the premenstrual phase or the luteal phase).

[0191] In embodiments, the method ameliorates pain and/or progressive neuropathy.

[0192] In embodiments, the iRNA (e.g., dsRNA) or composition comprising the iRNA is administered according to a dosing regimen.

[0193] In some embodiments, the iRNA (e.g., dsRNA) or composition comprising the iRNA is administered before or during an acute attack of porphyria. In some embodiments, the iRNA is administered before an acute attack of porphyria.

[0194] In some embodiments, the iRNA (e.g., dsRNA) or composition comprising the iRNA is administered during a prodrome. In embodiments, the prodrome is characterized by abdominal pain, nausea, psychological symptoms (e.g., anxiety), restlessness and/or insomnia.

[0195] In embodiments, the iRNA (e.g., dsRNA) or composition comprising the iRNA is administered during a particular phase of the menstrual cycle, e.g., during the luteal phase. In embodiments, the method ameliorates or prevents cyclical attacks of porphyria, e.g., by reducing the severity, duration, or frequency of attacks. In embodiments, the cyclical attacks are associated with a precipitating factor. In embodiments, the precipitating factor is the menstrual cycle, e.g., a particular phase of the menstrual cycle, e.g., the luteal phase.

[0196] In embodiments, the subject has an elevated level of ALA and/or PBG. In embodiments, the level of ALA and/or PBG is elevated in plasma or urine from the subject. In embodiments, the subject has or is at risk for developing a porphyria, e.g., a hepatic porphyria. In embodiments, the subject is asymptomatic. In embodiments, the subject carries a genetic alteration (e.g., a gene mutation) associated with a porphyria, as described herein. In embodiments, the subject has or is at risk for developing a porphyria and suffers from pain (e.g., chronic pain, e.g., chronic neuropathic pain) and/or neuropathy (e.g., progressive neuropathy). In embodiments, the subject does not suffer from acute attacks but suffers from pain (e.g., chronic pain, e.g., chronic neuropathic pain) and/or neuropathy (e.g., progressive neuropathy). In embodiments, the pain is abdominal pain.

[0197] In embodiments, the subject (a) has an elevated level of ALA and/or PBG and (b) suffers from pain (e.g., chronic pain, e.g., chronic neuropathic pain) and/or neuropathy (e.g., progressive neuropathy). In embodiments, the pain is abdominal pain.

[0198] In embodiments, the subject has a plasma level and/or a urine level of ALA and/or PBG that is elevated. In embodiments, the elevated level of ALA and/or PBG is accompanied by other symptoms, e.g., pain (e.g., chronic pain, e.g., chronic neuropathic pain) or neuropathy (e.g., progressive neuropathy). In embodiments, the pain is abdominal pain. In embodiments, the subject is asymptomatic. In embodiments, the subject has a genetic mutation associated with a porphyria, e.g., a mutation as described herein.

[0199] In embodiments, the subject has a level (e.g., a plasma level or a urine level) of a porphyrin precursor, e.g., ALA and/or PBG, that is elevated, e.g., the level is greater than, or greater than or equal to, a reference value. In embodiments, the level is greater than the reference value. In embodiments, the reference value is two standard deviations above the mean level in a sample of healthy individuals. In embodiments, the reference value is an upper reference limit.

[0200] In embodiments, the subject has a plasma level and/or a urine level of ALA and/or PBG that is greater than, or greater than or or equal to, 2 times, 3 times, 4 times, or 5 times that of an upper reference limit. As used herein, an “upper reference limit” refers to a level that is the upper limit of the 95% confidence interval for a reference sample, e.g., a sample of normal (e.g., wild type) or healthy individuals, e.g., individuals who do not carry a genetic mutation associated with a porphyria and/or individuals who do not suffer from a porphyria. In embodiments, the subject has a urine level of ALA and/or PBG that is greater than 2 to 4 times that of an upper reference limit. In embodiments, the subject has a urine level of ALA and/or PBG that is greater than 4 times that of an upper reference limit.

[0201] In embodiments, the reference value for plasma PBG is 0.12 μmol/L. In embodiments, the subject is a human and has a plasma PBG level that is greater than, or greater than or equal to, 0.12 μmol/L, 0.24 μmol/L, 0.36 μmol/L, 0.48 μmol/L, or 0.60 μmol/L. In embodiments, the subject is a human and has a plasma level of PBG that is greater than, or greater than or equal to, 0.48 μmol/L.

[0202] In embodiments, the reference value for urine PBG is 1.2 mmol/mol creatinine. In embodiments, the subject is a human and has a urine PBG level that is greater than, or greater than or equal to, 1.2 mmol/mol creatinine, 2.4 mmol/mol creatinine, 3.6 mmol/mol creatinine, 4.8 mmol/mol creatinine, or 6.0 mmol/mol creatinine. In embodiments, the subject is a human and has a urine level of PBG that is greater than, or greater than or equal to, 4.8 mmol/mol creatinine.

[0203] In embodiments, the reference value for plasma ALA is 0.12 μmol/L. In embodiments, the subject is a human and has a plasma ALA level that is greater than, or greater than or equal to, 0.12 μmol/L, 0.24 μmol/L, 0.36 μmol/L, 0.48 μmol/L, or 0.60 μmol/L. In embodiments, the subject is a human and has a plasma ALA level that is greater than, or greater than or equal to 0.48 μmol/L.

[0204] In embodiments, the reference value for urine ALA is 3.1 mmol/mol creatinine. In embodiments, the subject is a human and has a urine ALA level that is greater than, or greater than or equal to, 3.1 mmol/mol creatinine, 6.2 mmol/mol creatinine, 9.3 mmol/mol creatinine, 12.4 mmol/mol creatinine, or 15.5 mmol/mol creatinine.

[0205] In embodiments, the method decreases one or more signs or symptoms of a porphyria. In embodiments, the method decreases an elevated level of ALA and/or PBG. In embodiments, the method decreases pain (e.g., chronic pain, e.g. chronic neuropathic pain) and/or neuropathy (e.g., progressive neuropathy). In embodiments, the pain is abdominal pain. In embodiments, the pain is neuropathic pain (e.g., pain associated with the progressive neuropathy of acute porphyrias). The decrease in pain can include, e.g., prevention of pain, delay in the onset of pain, reduction in the frequency of pain, and/or reduction in severity of pain. In embodiments, the decrease in pain is assessed based on the subject's use of pain medication.

[0206] In embodiments, the method ameliorates or prevents acute attacks of porphyria, e.g., by reducing the severity, duration, or frequency of attacks.

[0207] In embodiments, the method decreases or prevents nerve damage.

[0208] In embodiments, the method prevents deterioration (e.g., prevents development of abnormalities) of or results in an improvement of clinical measures, e.g., clinical measures of muscle and/or nerve function, e.g., EMG and/or nerve conduction velocities.

[0209] In embodiments, the method decreases heme use by the subject.

[0210] In embodiments, the method decreases pain medication use by the subject.

[0211] In embodiments, the method reduces hospitalization.

[0212] In embodiments, the method is effective to reduce a level of ALA and/or PBG (e.g., a plasma or urine level of ALA and/or PBG). In embodiments, the method is effective to produce a predetermined reduction in the elevated level of ALA and/or PBG.

[0213] In embodiments, the predetermined reduction is a reduction to a value that is less than or equal to a reference value. In some embodiments, the reference value is an upper reference limit. In some embodiments, the reference value is the value that is two standard deviations above the mean level in a reference sample.

[0214] In embodiments, the method is effective to reduce the level of ALA and/or PBG in a subject to a level that is below two times the upper reference limit. In embodiments, the method is effective to reduce the level of ALA to below two times the upper reference limit. In embodiments, the method is effective to reduce the level of PBG to below two times the upper reference limit.

[0215] In embodiments, the iRNA (e.g., dsRNA) or composition comprising the iRNA is administered as a single dose or at multiple doses, e.g., according to a dosing regimen.

[0216] In embodiments, the iRNA (e.g., dsRNA) or composition comprising the iRNA is administered prophylactically to a subject who is at risk for developing a porphyria. In embodiments, the iRNA (e.g., dsRNA) or composition comprising the iRNA is administered prophylactically beginning at puberty. In embodiments, the subject carries a genetic mutation associated with a porphyria and/or has an elevated level of ALA and/or PBG (e.g., an elevated plasma or urine level of ALA and/or PBG). In embodiments, the mutation makes an individual susceptible to an acute attack (e.g., upon exposure to a precipitating factor, e.g., a drug, dieting or other precipitating factor, e.g., a precipitating factor as disclosed herein). In embodiments, the mutation is associated with elevated levels of a porphyrin or a porphyrin precursor (e.g., ALA and/or PBG). In embodiments, the mutation is associated with chronic pain (e.g., chronic neuropathic pain) and/or neuropathy (e.g., progressive neuropathy).

[0217] In embodiments, the mutation is a mutation in the ALAS1 gene. In embodiments, the mutation is a mutation in the ALAS1 gene promoter, or in regions upstream or downstream from the ALAS1 gene. In embodiments, the mutation is a mutation in transcription factors or other genes that interact with ALAS1. In embodiments, the mutation is a mutation in a gene that encodes an enzyme in the heme biosynthetic pathway.

[0218] In embodiments, the iRNA (e.g., dsRNA or a conjugate thereof) or composition comprising the iRNA is administered subcutaneously. In embodiments, the iRNA is in the form of a GalNAc conjugate. In embodiments, the iRNA (e.g., the dsRNA) is administered at a dose of 0.5-50 mg/kg. In certain embodiments, the iRNA is administered at a dose of less than 10 mg/kg (e.g., 5 mg/kg or less) once per week; e.g., a dose of 1 mg/kg or less, 2.5 mg/kg or less, or 5 mg/kg or less, e.g., once per week. In one embodiment, iRNA is administered at a dose of about 2.5 mg/kg or less, e.g., once per week.

[0219] In embodiments, the subject to be treated is asymptomatic and has an elevated level of ALA and/or PBG. In embodiments, the subject has a porphyria, e.g., AIP. In embodiments, the patient suffers from recurrent porphyric attacks.

[0220] In embodiments, the iRNA (e.g., AD-60519) is administered at a dose of less than 5 mg/kg, e.g., at 0.1, 0.35, 1.0, or 2.5 mg/kg. In embodiments, the iRNA (e.g., AD-60519) is administered in repeated doses, e.g., weekly doses.

[0221] In one embodiment, the subject is asymptomatic and has an elevated level of ALA and/or PBG, and the iRNA (e.g., AD-60519) is administered at single doses, e.g., at 0.1, 0.35, 1.0, or 2.5 mg/kg; or in repeatedly weekly dosages, e.g., of 1 and 2.5 mg/kg for several weeks (e.g., for 4 weeks).

[0222] In one embodiment, the subject has AIP, e.g., is an AIP patient, the iRNA (e.g., AD-60519) is administered at a dose of 1-2.5 mg/kg weekly.

[0223] In embodiments, a treatment regimen is employed in which the iRNA is initially administered more frequently, followed by less frequent administration. In embodiments, the iRNA is initially administered once per day for multiple days (e.g., for 2-14 days, e.g., for 2, 3, 4, 5, 6, or 7 days). In embodiments, the iRNA is subsequently administered once per week. In embodiments, the iRNA is subsequently administered once every two weeks. In embodiments, the iRNA is subsequently administered at a frequency that is effective to reduce one or more signs or symptoms of a porphyria.

[0224] In one aspect provided herein is a method of treating a subject with an elevated level of ALA and/or PBG, the method comprising administering to the subject a double-stranded ribonucleic acid (dsRNA), wherein said dsRNA comprises a sense strand and an antisense strand 15-30 base pairs in length and the antisense strand is complementary to at least 15 contiguous nucleotides of SEQ ID NO:1 or SEQ ID NO:382.

[0225] In one aspect provided herein is a method of treating a subject with an elevated level of ALA and/or PBG, the method comprising administering to the subject a therapeutically effective amount of an dsRNA or a composition comprising a dsRNA, as described herein.

[0226] In some embodiments, the methods described herein are effective to decrease the level of ALA and/or PBG. In some embodiments, the level of ALA and/or PBG is decreased such that it is less than, or less than or equal to, a reference value, e.g., an upper reference limit.

[0227] In embodiments, the subject to be treated is asymptomatic and has an elevated level of ALA and/or PBG. In embodiments, the subject has a porphyria, e.g., AIP.

[0228] In embodiments, the iRNA is administered at a dose of less than 5 mg/kg, e.g., at 0.1, 0.35 1.0, or 2.5 mg/kg. In embodiments, the iRNA is administered in repeated doses, e.g., weekly doses.

[0229] In another aspect, the invention provides methods for decreasing a level of a porphyrin or a porphyrin precursor in a cell (e.g., an erythroid cell or a liver cell, such as, e.g., a hepatocyte). In one embodiment, the cell is treated ex vivo, in vitro, or in vivo (e.g., the cell is present in a subject (e.g., a patient in need of treatment, prevention and/or management of a disorder related to ALAS1 expression). The method includes contacting the cell with an effective amount of one or more of the iRNAs targeting ALAS1, e.g., one or more of the iRNAs disclosed herein, thereby decreasing the level of a porphyrin or a porphyrin precursor in the cell; or decreasing the level of a porphyrin or a porphyrin precursor in other cells, tissues, or fluids within a subject in which the cell is located; relative to the level prior to contacting. Such methods can be used to treat (e.g., ameliorate the severity) of disorders related to ALAS1 expression, such as porphyrias, e.g., AIP or ALA dehydratase deficiency porphyria.

[0230] In one embodiment, the contacting step is effected ex vivo, in vitro, or in vivo. For example, the cell can be present in a subject, e.g., a mammal (e.g., a human) at risk, or that has been diagnosed with, a porphyria. In an embodiment, the porphyria is an acute hepatic porphyria. In embodiments, the porphyria is a hepatic porphyria, e.g., a porphyria selected from acute intermittent porphyria (AIP), hereditary coproporphyria (HCP), variegate porphyria (VP), ALA deyhdratase deficiency porphyria (ADP), and hepatoerythropoietic porphyria. In embodiments, the porphyria is a homozygous dominant hepatic porphyria (e.g., homozygous dominant AIP, HCP, or VP) or hepatoerythropoietic porphyria, In embodiments, the porphyria is a dual porphyria.

[0231] In an aspect provided herein is a method for decreasing a level of a porphyrin or a porphyrin precursor (e.g., ALA or PBG) in a cell, comprising contacting the cell with an iRNA (e.g. a dsRNA), as described herein, in an amount effective to decrease the level of the porphyrin or the porphyrin precursor in the cell.

[0232] In embodiments, the cell is a hepatocyte. In embodiments, the porphyrin or porphyrin precursor is δ-aminolevulinic acid (ALA), porphopilinogen (PBG), hydroxymethylbilane (HMB), uroporphyrinogen I or III, coproporphyrinogen I or III, protoporphrinogen IX, or protoporphyrin IX. In embodiments, the porphyrin precursor is ALA or PBG.

[0233] In one embodiment, the cell is an erythroid cell. In a further embodiment, the cell is a liver cell (e.g., a hepatocyte).

[0234] In an aspect provided herein is a vector encoding at least one strand of an iRNA (e.g., a dsRNA) as described herein.

[0235] In an aspect provided herein is a vector encoding at least one strand of a dsRNA, wherein said dsRNA comprises a region of complementarity to at least a part of an mRNA encoding ALAS1, wherein said dsRNA is 30 base pairs or less in length, and wherein said dsRNA targets said mRNA for cleavage.

[0236] In embodiments, the region of complementarity is at least 15 nucleotides in length.

[0237] In embodiments, the region of complementarity is 19 to 21 nucleotides in length. In one aspect, the invention provides a vector for inhibiting the expression of an ALAS1 gene in a cell. In one embodiment, the vector comprises an iRNA as described herein. In one embodiment, the vector includes at least one regulatory sequence operably linked to a nucleotide sequence that encodes at least one strand of an iRNA as described herein. In one embodiment the vector comprises at least one strand of an ALAS1 iRNA.

[0238] In an aspect provided herein is a cell comprising a vector as described herein. In an aspect provided herein is a cell containing a vector for inhibiting the expression of an ALAS1 gene in a cell. The vector includes a regulatory sequence operably linked to a nucleotide sequence that encodes at least one strand of one of the iRNAs as described herein. In one embodiment, the cell is a liver cell (e.g., a hepatocyte). In another embodiment, the cell is an erythroid cell.

[0239] In another aspect, a method is provided for assaying the level of circulating extracellular ALAS1 mRNA in a subject, said method comprising detecting (e.g., measuring) the level of ALAS1 mRNA in a biological fluid sample (e.g., a blood sample (e.g., a serum or plasma sample), a cerebrospinal fluid sample, or a urine from the subject, said biological fluid sample comprising the ALAS1 mRNA, thereby assaying the level of circulating extracellular ALAS1 mRNA in the subject.

[0240] In another aspect, a method is provided for assaying the level of circulating extracellular ALAS1 mRNA in a subject, said method comprising (i) providing RNA (e.g., extracellular RNA) from a biological fluid sample (e.g., blood or plasma sample) from the subject, said biological fluid sample comprising the ALAS1 mRNA; (ii) obtaining an ALAS1 cDNA from the ALAS1 mRNA; (iii) contacting the ALAS1 cDNA with a nucleic acid complementary (e.g., probe and/or primer) to the ALAS1 cDNA or a portion thereof, thereby producing a reaction mix; and (iv) detecting (e.g., measuring) the level of ALAS1 cDNA in the reaction mix, wherein the ALAS1 cDNA level is indicative of the ALAS1 mRNA level, thereby assaying the level of circulating extracellular ALAS1 mRNA in the subject.

[0241] In embodiments, said biological fluid sample is a blood sample. In embodiments, said biological fluid sample is a serum sample. In embodiments, said biological fluid sample is a urine sample.

[0242] In embodiments, the method comprises PCR, qPCR or 5′-RACE.

[0243] In embodiments, said nucleic acid is a probe or primer.

[0244] In embodiments, said nucleic acid comprises a detectable moiety and the level of ALAS1 mRNA is determined by detection of the amount of the detectable moiety.

[0245] In embodiments, said method further comprises obtaining the biological fluid sample from the subject. In embodiments, the biological fluid sample is separate from the tissue and contains exosomes. In embodiments of these methods, the efficacy of a porphyria treatment is assessed based on a comparison of the level of circulating extracellular ALAS1 mRNA in the subject relative to a reference value.

[0246] In embodiments, a decrease in the level of circulating extracellular ALAS1 mRNA in the subject in response to the porphyria treatment, relative to the reference value, indicates that the porphyria treatment is efficacious. In embodiments, the reference value is the level of circulating extracellular ALAS1 mRNA in the subject prior to the porphyria treatment.

[0247] All publications, patent applications, patents, and other references mentioned herein are incorporated by reference in their entirety.

[0248] The details of various embodiments of the invention are set forth in the description below. Other features, objects, and advantages of the invention will be apparent from the description and the drawings, and from the claims.

### DESCRIPTION OF THE DRAWINGS

[0249] FIG. 1 depicts the heme biosynthetic pathway.

[0250] FIG. 2A and FIG. 2B show a table summarizing certain porphyrias associated with genetic errors in heme metabolism.

[0251] FIG. 3A and FIG. 3B depict a human ALAS1 mRNA sequence transcript (Ref. Seq. NM_000688.4 (GI:40316942, record dated Nov. 19, 2011), SEQ ID NO: 1).

[0252] FIG. 4A and FIG. 4B depict a human ALAS1 mRNA sequence transcript (Ref. Seq. NM_000688.5 (GI: 362999011, record dated Apr. 1, 2012), SEQ ID NO: 382).

[0253] FIG. 5 shows the dose-response of the siRNA AD-53558 in suppressing mouse ALAS1 (mALAS1) mRNA relative to a PBS control. Results for a luciferase (LUC) AD-1955 control are also shown.

[0254] FIG. 6 shows the dose-response of the siRNA AD-53558 in suppressing ALAS1 mRNA in rats relative to a PBS control. Results for a luciferase (LUC) AD-1955 control are also shown.

[0255] FIG. 7 shows the durability of suppression of mouse ALAS1 (mALAS1) mRNA by the siRNA AD-53558 relative to a PBS control.

[0256] FIG. 8 shows means±standard deviations of plasma ALA levels (in μM) at baseline, and after phenobarbital treatment in the experimental (ALAS1 siRNA) and control (LUC siRNA) groups.

[0257] FIG. 9 shows the plasma ALA levels (in μM) of individual animals at baseline, and after phenobarbital treatment in animals that received ALAS1 siRNA and control (LUC siRNA) treatment.

[0258] FIG. 10 shows means±standard deviations of plasma PBG levels (in μM) at baseline, and after phenobarbital treatment in animals that received ALAS1 siRNA and control (LUC siRNA) treatment.

[0259] FIG. 11 shows the plasma PBG levels (in μM) of individual animals at baseline, and after phenobarbital treatment in animals that received ALAS1 siRNA and control (LUC siRNA) treatment.

[0260] FIG. 12 shows the relative mALAS1mRNA level in liver at baseline, and after phenobarbital treatment in select representative experimental (ALAS1 siRNA) and control (PBS) animals.

[0261] FIG. 13 shows the effects of three GalNAc conjugated mALAS1 siRNAs on mALAS1 expression (relative to a PBS control) in mouse liver tissue.

[0262] FIG. 14 shows plasma ALA and PBG levels over time after phenobarbital administration and treatment with ALAS1 siRNA or control LUC siRNA.

[0263] FIG. 15 shows the effects of a GalNAc conjugated ALAS1 siRNA on plasma ALA and plasma PBG levels in the mouse AIP phenobarbital induction model.

[0264] FIG. 16 shows dose-dependent effects of an ALAS1 siRNA on plasma ALA and PBG levels in the mouse AIP phenobarbital induction model. For the animals that received ALAS1 siRNA, the dose of siRNA administered (0.05 mg/kg, 0.1 mg/kg, 0.5 mg/kg, or 1.0 mg/kg) is shown on the horizontal axis.

[0265] FIG. 17, top panel shows the experimental design used to study suppression of ALA and PBG with an ALAS1 siRNA. The bottom panel shows the plasma ALA and PBG levels at baseline, in the control (Luc) condition, and following treatment with an ALAS1 siRNA at week 0, week 2, and week 4.

[0266] FIG. 18 shows the experimental design used to compare the effects of treatment with ALAS1 siRNA or hemin in an animal model of AIP (top) and the results for plasma ALA (μmol/L) levels (middle) and plasma PBG (μmol/L) levels (bottom).

[0267] FIG. 19 shows relative mRNA levels (ALAS1/GAPDH) in animals treated with 30 mg/kg, 10 mg/kg, or 3 mg/kg of AD-58632 compared with animals treated with PBS control.

[0268] FIG. 20 shows the experimental design used to investigate the dose response effect of the AD-58632 ALAS1 GalNAc conjugate in a rat AIP model.

[0269] FIG. 21 shows relative levels of liver PBGD mRNA (top graph) and relative levels of liver ALAS1 mRNA (bottom graph) in a rat model of AIP. Groups of animals were subjected to one of four treatments: (1) phenobarbital (PB) treatment only, (2) phenobarbital and porphobilinogen deaminase (PBGD) siRNA treatment, (3) phenobarbital, PBGD siRNA, and 30 mg/kg of ALAS1 siRNA, (4) phenobarbital, PBGD siRNA, and 10 mg/kg of ALAS1 siRNA.

[0270] FIG. 22 shows urinary PBG (top panel) and ALA (bottom panel) levels relative to creatinine levels in a rat model of AIP. Groups of animals were subjected to one of four treatments: (1) phenobarbital (PB) treatment only, (2) phenobarbital and porphobilinogen deaminase (PBGD) siRNA treatment, (3) phenobarbital, PBGD siRNA, and 30 mg/kg of ALAS1 siRNA, (4) phenobarbital, PBGD siRNA, and 10 mg/kg of ALAS1 siRNA.

[0271] FIG. 23 shows the suppression of ALAS-1 mRNA by AD-58632, compared with PBS control, in groups of rats that received five daily doses of siRNA at 6 mg/kg, 2 mg/kg, or 1 mg/kg versus single bolus doses of siRNA at 30 mg/kg, 10 mg/kg, or 5 mg/kg.

[0272] FIG. 24 shows the suppression of ALAS-1 mRNA by AD-58632, compared with PBS control, in groups of rats that received four weekly doses of siRNA at 10 mg/kg, 5 mg/kg, or 2.5 mg/kg.

[0273] FIG. 25 shows the suppression of ALAS-1 mRNA by AD-58632 and by five 19/19mer duplexes.

[0274] FIG. 26 shows the results of an evaluation of the effect of strand length and overhangs on the best two 19mers.

[0275] FIG. 27 is a graph that shows the levels of ALAS1 mRNA in liver (left bars) and in serum (right bars) for each treatment group in the NHP study described in Example 34.

[0276] FIG. 28 shows the suppression of ALAS-1 mRNA, compared with PBS control, in groups of rats that received 3 mg/kg or 10 mg/kg of AD-58632 or AD-60489.

[0277] FIG. 29 shows the experimental design used to investigate the effectiveness of ALAS1 siRNAs AD-58632 and AD-60489 in suppressing liver mRNA in non-human primates.

[0278] FIG. 30 shows the dose-dependent suppression of liver mRNA in non-human primates following treatment with 1.25 mg/kg, 2.5 mg/kg, or 5 mg/kg of AD-58632 or AD-60489.

[0279] FIG. 31 shows a comparison of the mRNA suppression results obtained from liver biopsies and from the cERD assay in a non-human primate study.

[0280] FIG. 32 shows the time course of suppression of mRNA as assessed using the cERD assay in a non-human primate study. The horizontal axis shows the time according to the study day.

[0281] FIG. 33 shows the suppression of ALAS1 mRNA in rats that received PBS or a single dose of 5 mg/kg of one of the indicated siRNA duplexes.

[0282] FIG. 34 shows the liver concentrations of the siRNA in rats that received a single dose of 5 mg/kg of the indicated siRNA.

[0283] FIG. 35 (top) shows the experimental design used to investigate the therapeutic efficacy of AD-60925 and AD-60926. FIG. 35(bottom) shows the relative levels of rat ALAS1/GAPDH mRNA in rats treated with (1) AF11-PBGD, (2) AF11-PBGD and PB, (3) AF-11PBGD, PB, and 3 mg/kg AD-60925, or (4) AF11-PBGD, PB, and AD-60926.

[0284] FIG. 36 shows the relative levels of urine PBG (top) and urine ALA (bottom) in rats treated with (1) AF11-PBGD, (2) AF11-PBGD and PB, (3) AF-11PBGD, PB, and 3 mg/kg AD-60925, or (4) AF11-PBGD, PB, and AD-60926.

[0285] FIG. 37 shows the relative levels of urine PBG (top) and urine ALA (bottom) over time in rats treated with (1) AF11-PBGD, (2) AF11-PBGD and PB, (3) AF-11PBGD, PB, and 3 mg/kg AD-60925, or (4) AF11-PBGD, PB, and AD-60926. The arrows indicate the timepoints when PB was administered.

[0286] FIG. 38 shows the relative levels of rat ALAS1 (rALAS1) mRNA in rats that received 4 doses of PBS or 2.5 mg/kg of one of the indicated siRNAs.

[0287] FIG. 39 shows the relative levels of rat ALAS1 (rALAS1) mRNA in rats that received a single dose of PBS or 2.5 mg/kg of one of the indicated siRNAs.

[0288] FIG. 40 (top) shows the relative levels of rat ALAS1 (rALAS1) mRNA in rats that received a single dose of PBS or 3 mg/kg of one of the indicated siRNAs. FIG. 40 (bottom) shows the concentration of siRNA in liver.

[0289] FIG. 41 (top) shows the suppression of rat ALAS1 (rALAS1) mRNA by AD-60489, AD-60519, and AD-60901. FIG. 41 (bottom) shows the concentration of siRNA in liver.

[0290] FIG. 42 shows the relative levels of rat ALAS1 (rALAS1) mRNA in rats that were treated with a single dose of PBS or 2.5 mg/kg of one of the indicated siRNAs.

[0291] FIG. 43 shows the relative levels of rat ALAS1 (rALAS1) mRNA in rats that were treated with PBS or one of the indicated siRNAs at a dose of 2.5 mg/kg twice per week for 2 weeks.

[0292] FIG. 44 (top) shows a schematic of the experimental design used to investigate the therapeutic efficacy of multiple biweekly doses of AD-60519. FIG. 44 (bottom) shows graphs depicting the suppression of urine PBG and urine ALA in rats that were treated with (i) PBGD siRNA and six doses of PBS, (ii) PBGD siRNA, PB, and six doses of PBS, (iii) PBGD siRNA, PB, and six doses of 2.5 mg/kg AD-60519, or (iv) PBGD siRNA, PB, and six doses of 5 mg/kg AD-60519.

[0293] FIG. 45 shows graphs depicting the suppression of serum PBG (upper graph) and serum ALA (lower graph) in a mouse AIP model that were treated with (i) PBGD siRNA and six doses of PBS (Baseline), (ii) PBGD siRNA, PB, and six doses of PBS (Saline), (iii) PBGD siRNA, PB, and six doses of 2.5 mg/kg AD-60519, or (iv) PBGD siRNA, PB, and six doses of 5 mg/kg AD-60519.

[0294] FIG. 46 (top) shows a schematic of the experimental design used to investigate the therapeutic efficacy of multiple weekly doses of AD-60519. FIG. 46 (bottom) shows a graph depicting the relative levels of rat ALAS1 mRNA (rALAS1/GAPDH) in rats that were treated with (i) PBGD siRNA and four doses of PBS, (ii) PBGD siRNA, PB, and four doses of PBS, (iii) PBGD siRNA, PB, and four doses of 3 mg/kg AD-60519, (iv) PBGD siRNA, PB, and four doses of 1 mg/kg AD-60519, or (v) PBGD siRNA, PB, and four doses of 0.3 mg/kg AD-60519.

[0295] FIG. 47 shows graphs depicting the levels of urine PBG (upper graph) and urine ALA (lower graph) in rats that were treated with (i) PBGD siRNA and four doses of PBS, (ii) PBGD siRNA, PB, and four doses of PBS, (iii) PBGD siRNA, PB, and four doses of 3 mg/kg AD-60519, (iv) PBGD siRNA, PB, and four doses of 1 mg/kg AD-60519, or (v) PBGD siRNA, PB, and four doses of 0.3 mg/kg AD-60519.

[0296] FIG. 48 is a schematic that shows the design of a non-human primate study in which effects of ALAS1 siRNA GalNAc conjugates in suppressing liver ALAS1 mRNA and circulating ALAS1 mRNA were investigated

[0297] FIG. 49 is a graph that shows suppression of liver mRNA in non-human primates (NHPs) following treatment with ALAS1 siRNA GalNAc conjugates.

[0298] FIG. 50 is a graph that shows the normalized serum levels of ALAS1 mRNA in non-human primates (NHPs) at various times during the course of a study in which effects of treatment with ALAS1 siRNA GalNAc conjugates was investigated. The days on the horizontal axis correspond to the days in the schematic in FIG. 48.

[0299] FIG. 51 shows the normalized ALAS1 mRNA levels (shown as a fraction of the pre-dose level) as assessed in a rat single dose study that used urine cERD to monitor ALAS1 suppression.

[0300] FIG. 52 is a schematic that shows the design of a non-human primate study in which multidose and single dose effects of AD-60519 in suppressing liver ALAS1 mRNA and circulating ALAS1 mRNA were investigated.

[0301] FIG. 53 is a bar graph that shows the average relative liver ALAS1 mRNA levels (% of PBS control) at study day 24 (multidose groups) or at study day 4 (single dose groups).

[0302] FIG. 54 is a graph that shows normalized serum ALAS1 mRNA levels (shown as a fraction of the pre-dose level) as assessed using cERD for the multidose groups (top graph, showing results up to day 24) and single dose groups (bottom graph, showing results up to day 22).

[0303] FIG. 55 is a graph that shows the liver mRNA, serum mRNA, and urine mRNA levels at study day 4 (in the single dose groups) or at study day 24 (in the multidose groups). Data for individual animals and the averages for each group are shown.

[0304] FIG. 56 is a graph that shows normalized serum ALAS1 mRNA levels (shown as a fraction of the pre-dose level) after 8 weeks as assessed using cERD for the multidose groups. Each graphical data point represents the remaining ALAS1 mRNA for the group average of 3 animal samples±the standard deviation of the group.

[0305] FIG. 57 is a schematic of the structure of ALN-60519 (also referred to herein as AD-60519). FIG. 57 discloses SEQ ID NOS 5238-5239, respectively, in order of appearance.

[0306] FIG. 58 shows ALAS1 mRNA levels as assessed in matching serum or urine samples obtained from either AIP patients or normal healthy volunteers (NHV). ALAS1 mRNA levels in serum or urine were measured using the cERD method. In AIP patients A and B, a second set of serum and urine samples were collected to access ALAS1 mRNA variability over time.

### DETAILED DESCRIPTION OF THE INVENTION

[0307] iRNA directs the sequence-specific degradation of mRNA through a process known as RNA interference (RNAi). Described herein are iRNAs and methods of using them for inhibiting the expression of an ALAS1 gene in a cell or a mammal where the iRNA targets an ALAS1 gene. Also provided are compositions and methods for disorders related to ALAS1 expression, such as porphyrias (e.g., ALA deyhdratase deficiency porphyria (ADP or Doss porphyria), acute intermittent porphyria, congenital erythropoietic porphyria, prophyria cutanea tarda, hereditary coproporphyria (coproporphyria), variegate porphyria, erythropoietic protoporphyria (EPP), X-linked sideroblastic anemia (XLSA), and transient erythroporphyria of infancy).

[0308] Porphyrias are inherited or acquired disorders that can be caused by decreased or enhanced activity of specific enzymes in the heme biosynthetic pathway, also referred to herein as the porphyrin pathway (See FIG. 1). Porphyrins are the main precursors of heme. Porphyrins and porphyrin precursors include δ-aminolevulinic acid (ALA), porphopilinogen (PBG), hydroxymethylbilane (HMB), uroporphyrinogen I or III, coproporphyrinogen I or III, protoporphrinogen IX, and protoporphyrin IX. Heme is an essential part of hemoglobin, myoglobin, catalases, peroxidases, and cytochromes, the latter including the respiratory and P450 liver cytochromes. Heme is synthesized in most or all human cells. About 85% of heme is made in erythroid cells, primarily for hemoglobin. Most of the remaining heme is made in the liver, 80% of which is used for the synthesis of cytochromes. Deficiency of specific enzymes in the porphyrin pathway leads to insufficient heme production and also to an accumulation of porphyrin precursors and/or porphyrins, which can be toxic to cell or organ function in high concentrations.

[0309] Porphyrias may manifest with neurological complications (“acute”), skin problems (“cutaneous”) or both. Porphyrias may be classified by the primary site of the overproduction and accumulation of porphyrins or their precursors. In hepatic porphyrias, porphyrins and porphyrin precursors are overproduced predominantly in the liver, whereas in erythropoietic porphyrias, porphyrins are overproduced in the erythroid cells in the bone. The acute or hepatic porphyrias lead to dysfunction of the nervous system and neurologic manifestations that can affect both the central and peripheral nervous system, resulting in symptoms such as, for example, pain (e.g., abdominal pain and/or chronic neuropathic pain), vomiting, neuropathy (e.g., acute neuropathy, progressive neuropathy), muscle weakness, seizures, mental disturbances (e.g., hallucinations, depression anxiety, paranoia), cardiac arrhythmias, tachycardia, constipation, and diarrhea. The cutaneous or erythropoietic porphyrias primarily affect the skin, causing symptoms such as photosensitivity that can be painful, blisters, necrosis, itching, swelling, and increased hair growth on areas such as the forehead. Subsequent infection of skin lesions can lead to bone and tissue loss, as well as scarring, disfigurement, and loss of digits (e.g., fingers, toes). Most porphyrias are caused by mutations that encode enzymes in the heme biosynthetic pathway. A summary of porphyrias associated with genetic errors in heme metabolism is provided in FIG. 2.

[0310] Not all porphyrias are genetic. For example, patients with liver disease may develop porphyria as a result of liver dysfunction, and a transient form of erythroporphria (transient erythroporphyria of infancy) has been described in infancy (see Crawford, R. I. et al, J Am Acad Dermatol. 1995 August; 33(2 Pt 2):333-6.) Patients with PCT can acquire the deficient activity of uroporphyrinogen decarboxylase (URO-D), due to the formation of a ORO-D enzyme with lower than normal enzymatic activity (see Phillips et al. Blood, 98:3179-3185, 2001.)

[0311] Acute intermittent porphyria (AIP) (also be referred to as porphobilinogen (PBG) deaminase deficiency, or hydroxymethylbilane synthase (HMBS) deficiency), is the most common type of acute hepatic porphyria. Other types of acute hepatic porphyrias include hereditary coproporphyria (HCP), variegate porphyria (VP), and ALA deyhdratase deficiency porphyria (ADP). Acute hepatic porphyrias are described, e.g., in Balwani, M and Desnick, R. J., Blood, 120:4496-4504, 2012.

[0312] AIP is typically an autosomal dominant disease that is characterized by a deficiency of the enzyme porphobilinogen deaminase (PBG deaminase); this enzyme is also known as hydroxymethylbilane synthase (HMB synthase or HMBS). PBG deaminase is the third enzyme of the heme biosynthetic pathway (see FIG. 1) and catalyzes the head to tail condensation of four porphobilinogen molecules into the linear tetrapyrrole, hydroxymethylbilane (HMB). Alternatively spliced transcript variants encoding different isoforms of PBG deaminase have been described. Mutations in the PBG deaminase gene are associated with AIP. Such mutations may lead to decreased amounts of PBG deaminase and/or decreased activity of PBG deaminase (affected individuals typically have a ˜50% reduction in PBG deaminase activity).

[0313] There are at least two different models of the pathophysiology of AIP and other acute hepatic porphyrias (see, e.g., Lin C S-Y et al., Clinical Neurophysiology, 2011; 122:2336-44). According to one model, the decreased heme production resulting from PBG deaminase deficiency causes energy failure and axonal degeneration. According to the other, currently more favored model, the buildup of porphyrin precursors (e.g., ALA and PBG) results in neurotoxicity.

[0314] AIP has been found to have a prevalence as high as 1 in 10,000 in certain populations (e.g., in Northern Sweden; see Floderus Y, et al. Clin Genet. 2002; 62:288-97). The prevalence in the general population in United States and Europe, excluding the U.K., is estimated to be about 1 in 10,000 to 1 in 20,000. Clinical disease manifests itself in only approximately 10-15% of individuals who carry mutations that are known to be associated with AIP. However, the penetrance is as high as 40% in individuals with certain mutations (e.g., the W198X mutation). AIP is typically latent prior to puberty. Symptoms are more common in females than in males. The prevalence of the disease is probably underestimated due to its incomplete penetrance and long periods of latency. In the United States, it is estimated that there are about 2000 patients who have suffered at least one attack. It is estimated that there are about 150 active recurrent cases in France, Sweden, the U.K., and Poland; these patients are predominantly young women, with a median age of 30. See, e.g., Elder et al, J Inherit Metab Dis., published online Nov. 1, 2012.

[0315] AIP affects, for example, the visceral, peripheral, autonomic, and central nervous systems. Symptoms of AIP are variable and include gastrointestinal symptoms (e.g., severe and poorly localized abdominal pain, nausea/vomiting, constipation, diarrhea, ileus), urinary symptoms (dysuria, urinary retention/incontinence, or dark urine, e.g., dark red urine), neurologic symptoms (e.g., sensory neuropathy, motor neuropathy (e.g., affecting the cranial nerves and/or leading to weakness in the arms or legs), seizures, neuropathic pain (e.g., pain associated with progressive neuropathy, e.g., chronic neuropathic pain), neuropsychiatric symptoms (e.g., mental confusion, anxiety, agitation, hallucination, hysteria, delirium, apathy, depression, phobias, psychosis, insomnia, somnolence, coma), autonomic nervous system involvement (resulting e.g., in cardiovascular sysmptoms such as tachycardia, hypertension, and/or arrhythmias, as well as other symptoms, such as, e.g., increased circulating catecholamine levels, sweating, restlessness, and/or tremor), dehydration, and electrolyte abnormalities. The most common symptoms are abdominal pain and tachycardia. Neurological manifestations include motor and autonomic neuropathy and seizures. Patients frequently have chronic neuropathic pain and develop a progressive neuropathy. Patients with recurring attacks often have a prodrome. Permanent paralysis may occur after a severe attack. Recovery from severe attacks that are not promptly treated may take weeks or months. An acute attack may be fatal, for example, due to paralysis of respiratory muscles or cardiovascular failure from electrolyte imbalance. (See, e.g., Thunell S. Hydroxymethylbilane Synthase Deficiency. 2005 Sep. 27 [Updated 2011 Sep. 1]. In: Pagon R A, Bird T D, Dolan C R, et al., editors. GeneReviews™ [Internet]. Seattle (Wash.): University of Washington, Seattle; 1993—(hereinafter Thunell (1993)), which is hereby incorporated by reference in its entirety.) Prior to the availability of Hemin treatments, up to 20% of patients with AIP died from the disease.

[0316] In individuals who carry genes for AIP, the risk of hepatocellular cancer is increased. In those with recurrent attacks, the risk of hepatocellular cancer is particularly grave: after the age of 50, the risk is nearly 100-fold greater than in the general population.

[0317] Attacks of acute porphyria may be precipitated by endogenous or exogenous factors. The mechanisms by which such factors induce attacks may include, for example, increased demand for hepatic P450 enzymes and/or induction of ALAS1 activity in the liver. Increased demand for hepatic P450 enzymes results in decreased hepatic free heme, thereby inducing the synthesis of hepatic ALAS1.

[0318] Precipitating factors include fasting (or other forms of reduced or inadequate caloric intake, due to crash diets, long-distance athletics, etc.), metabolic stresses (e.g., infections, surgery, international air travel, and psychological stress), endogenous hormones (e.g., progesterone), cigarette smoking, lipid-soluble foreign chemicals (including, e.g., chemicals present in tobacco smoke, certain prescription drugs, organic solvents, biocides, components in alcoholic beverages), endocrine factors (e.g., reproductive hormones (women may experience exacerbations during the premenstrual period), synthetic estrogens, progesterones, ovulation stimulants, and hormone replacement therapy). See, for example, Thunell (1993).

[0319] Over 1000 drugs are contraindicated in the acute hepatic porphyrias (e.g., AIP, HCP, ADP, and VP) including, for example, alcohol, barbiturates, Carbamazepine, Carisoprodol, Clonazepam (high doses), Danazol, Diclofenac and possibly other NSAIDS, Ergots, estrogens, Ethyclorvynol, Glutethimide, Griseofulvin, Mephenytoin, Meprobamate (also mebutamate and tybutamate), Methyprylon, Metodopramide, Phenytoin, Primidone, progesterone and synthetic progestins, Pyrazinamide, Pyrazolones (aminopyrine and antipyrine), Rifampin, Succinimides (ethosuximide and methsuximide), sulfonamide antibiotics, and Valproic acid.

[0320] Objective signs of AIP include discoloration of the urine during an acute attack (the urine may appear red or red-brown), and increased concentrations of PBG and ALA in urine during an acute attack. Molecular genetic testing identifies mutations in the PBG deaminase (also known as HMBS) gene in more than 98% of affected individuals. Thunell (1993).

[0321] Diagnosis of porphria can involve assessment of family history, assessment of porphyrin precursor levels in urine, blood, or stool, and/or assessment of enzyme activity and DNA mutation analysis. The differential diagnosis of porphyrias may involve determining the type of porphyria by measuring individual levels of porphyrins or porphyrin precursors (e.g., ALA, PBG) in the urine, feces, and/or plasma (e.g., by chromatography and fluorometry) during an attack. The diagnosis of AIP can be confirmed by establishing that erythrocyte PBG deaminase activity is at 50% or less of the normal level. DNA testing for mutations may be carried out in patients and at-risk family members. The diagnosis of AIP is typically confirmed by DNA testing to identify a specific caustative gene mutation (e.g., an HMBS mutation).

[0322] Current management of acute attacks of AIP involves hospitalization, monitoring of symptoms, and removal of unsafe drugs. Treatment of acute attacks typically requires hospitalization to control and treat acute sysmptoms, including, e.g., abdominal pain, seizures, dehydration/hyponatremia, nausea/vomiting, tachycardia/hypertension, urinary retention/ileus. For example, abdominal pain may be treated, e.g., with narcotic analgesics, seizures may be treated with seizure precautions and possibly medications (although many anti-seizure medications are contraindicated), nausea/vomiting may be treated, e.g., with phenothiazines, and tachycardia/hypertension may be treated, e.g., with beta blockers. Treatment may include withdrawal of unsafe medications, monitoring of respiratory function, as well as muscle strength and neurological status. Mild attacks (e.g., those with no paresis or hyponatremia) may be treated with at least 300 g intravenous 10% glucose per day, although increasingly hemin is provided immediately. Severe attacks are typically treated as soon as possible with intravenous hemin (3-4 mg/kg daily for 4-14 days) and with IV glucose while waiting for the IV hemin to take effect. Typically, attacks are treated with IV hemin for 4 days and with IV glucose while waiting for administration of the IV hemin. Within 3-4 days following the start of hemin administration, there is usually clinical improvement accompanying by lowering of ALA and PBG levels.

[0323] Hemin (Panhematin® or hemin for injection, previously known as hematin) is the only heme product approved for use in the United States and was the first drug approved under the Orphan Drug Act. Panhematin® is hemin derived from processed red blood cells (PRBCs), and is Protoporphyrin IX containing a ferric iron ion (Heme B) with a chloride ligand. Heme acts to limit the hepatic and/or marrow synthesis of porphyrin. The exact mechanism by which hemin produces symptomatic improvement in patients with acute episodes of the hepatic porphyrias has not been elucidated; however, its action is likely due to the (feedback) inhibition of δ-aminolevulinic acid (ALA) synthase, the enzyme which limits the rate of the porphyrin/heme biosynthetic pathway. See Panhematin® product label, Lundbeck, Inc., October 2010. Inhibition of ALA synthase should result in reduced production of ALA and PBG as well as porphyrins and porphyrin intermediates.

[0324] Drawbacks of heme products (e.g., hemin) include delayed impact on clinical symptoms and failure to prevent the recurrence of attacks. Adverse reactions associated with heme (e.g., hemin) administration may include phlebitis (e.g., thrombophlebitis), difficulty with venous access, anticoagulation (or coagulopathies), thrombocytopenia, renal shut down, or iron overload, which is particularly likely in patients requiring multiple courses of hemin treatment for recurrent attacks. To prevent phlebitis, an indwelling venous catheter is needed for access in patients with recurrent attacks. Renal damage can occur with high doses. Uncommonly reported side effects include fever, aching, malaise, hemolysis, anaphalaxis, and circulatory collapse. See Anderson, K. E., Approaches to Treatment and Prevention of Human Porphyrias, in The Porphyrin Handbook: Medical Aspects of Porphyrins, Edited by Karl M. Kadish, Kevin M. Smith, Roger Guilard (2003) (hereinafter Anderson).

[0325] Heme is difficult to prepare in a stable form for intravenous administration. It is insoluble at neutral pH but can be prepared as heme hydroxide at pH 8 or higher. Anderson. Panhematin is a lyophilized hemin preparation. When lyophilized hemin is solubilized for intravenous administration, degradation products form rapidly; these degradation products are responsible for a transient anticoagulant effect and for phlebitis at the site of infusion. Anderson. Heme albumin and heme arginate (Normosang, the European version of hemin) are more stable and may potentially cause less thrombophlebitis. However, heme arginate is not approved for use in the United States. Panhemin may be stabilized by solubilizing it for infusion in 30% human albumin rather than in sterile water; however, albumin adds intravascular volume-expanding effects and increases the cost of treatment as well as risk of pathogens since it is isolated from human blood. See, e.g., Anderson supra.

[0326] The successful treatment of an acute attack does not prevent or delay recurrence. There is a question of whether hemin itself can trigger recurring attacks due to induction of heme oxygenase. Nonetheless, in some areas (especially France), young women with multiply recurrent attacks are being treated with weekly hemin with the goal of achieving prophylaxis. Limited experience with liver transplantation suggests that if successful, it is an effective treatment for AIP. There have been approximately 12 transplants in Europe in human patients, with curative or varying effects. Liver transplantation can restore normal excretion of ALA and PBG and prevent acute attacks. See, e.g., Dar, F. S. et al. Hepatobiliary Pancreat. Dis. Int., 9(1):93-96 (2010). Furthermore, if the liver of a patient with AIP is transplanted into another patient (“domino transplant”), the patient receiving the transplant may develop AIP. Among the long-term clinical effects of acute porphyrias is chronic neuropathic pain that may result from a progressive neuropathy due to neurotoxic effects, e.g., of elevated porphyrin precursors (e.g., ALA and/or PBG). The neurotoxic effects can be associated with toxic heme intermediate production, for example, altered GABA signaling and/or production of iron-mediated oxidation and reactive oxygen species (ROS). Patients may suffer from neuropathic pain prior to or during an acute attack. Older patients may experience increased neuropathic pain with age for which various narcotic drugs are typically prescribed. Electromyogram abnormalities and decreased conduction times have been documented in patients with acute hepatic porphyrias. Of note, untreated, uninduced mice with AIP (PBG deaminase deficiency) develop a progressive motor neuropathy that has been shown to cause progressive quadriceps nerve axon degeneration and loss presumably due to constitutively elevated porphyrin precursor (ALA & PBG) levels, porphyrins and/or heme deficiency (Lindberg et al., J. Clin. Invest., 103(8): 1127-1134, 1999). In patients with acute porphyria (e.g., ADP, AIP, HCP, or VP), levels of porphyrin precursors (ALA & PBG) are often elevated in asymptomatic patients and in symptomatic patients between attacks. Thus, reduction of the porphyrin precursors and resumption of normal heme biosynthesis by reducing the level of ALAS1 expression and/or activity is expected to prevent and/or minimize development of chronic and progressive neuropathy. Treatment, e.g., chronic treatment (e.g., periodic treatment with iRNA as described herein, e.g., treatment according to a dosing regimen as described herein, e.g., weekly or biweekly treatment) can continuously reduce the ALAS1 expression in acute porphyria patients who have elevated levels of porphyrin precursors, porphyrins, porphyrin products or their metabolites. Such treatment may be provided as needed to prevent or reduce the frequency or severity of an individual patient's symptoms (e.g., pain and/or neuropathy) and/or to reduce a level of a porphyrin precursor, porphyrin, porphyrin product or metabolite.

[0327] The need exists for identifying novel therapeutics that can be used for the treatment of porphyrias. As discussed above, existing treatments such as heme products (e.g., hemin) have numerous drawbacks. For example, the impact of hemin on clinical symptoms is delayed, it is expensive, and it may have side effects (e.g., thrombophlebitis, anticoagulation, thrombocytopenia, iron overload, renal shutdown). Novel therapeutics such as those described herein can address these drawbacks and the unmet needs of patients acting faster, not inducing phlebitis, providing the convenience of subcutaneous administration, successfully preventing recurrent attacks, preventing or ameliorating pain (e.g., chronic neuropathic pain) and/or progressive neuropathy, and/or not causing certain adverse effects associated with hemin (e.g., iron overload, increased risk of hepatocellular cancer).

[0328] Patients with AIA include those who suffer from recurrent attacks and those who suffer from acute, sporadic attacks. In the pateints who suffer from recurrent attacks, about 5-10% have recurrent intermittent attacks (2-3 attacks per year) or recurrent attacks (>4 attacks per year). These patients are most likely to consider liver transplant or to receive prophylactic heme (e.g., hemin) infusions. The recurrent attack patients are likely to have poor quality of life due to long hospital stays, opiate addiction, and/or venous network toxicity. Chronic heme administration can induce heme oxygenase (HO-1). Thus, it can be difficult to wean patients off heme and some require more frequent treatment. Some clinicials are therefore restricting heme use to the most serious attacks. Accordingly, there is an unmet need for convenient, effective prophylaxis and treatments with better tolerability.

For patients who suffer from acute attacks, clinical guidelines suggest administration of heme as early as possible. However, given the challenges of diagnosis and lack of immediate drug availability, administration may be delayed. The slow onset of the effects of heme (e.g., hemin) and its poor tolerability slow the time to improvement. Persistence of severe abdominal pain, even after administration of heme, can require that patients receive opiates for multiple days.

[0329] Delayed administration of heme or continued exposure to precipitating factors can lead to more serious complications, including motor neuropathy and accompanying symptoms (e.g., weakness, paresis). Respiratory failure and paralysis can occur in severe cases. Recovery from neurological symptoms can take much longer to resolve. Accordingly, in the context of acute attacks, treatments that have a faster onset of action and better tolerability are needed. Pharmacological validation of ALAS1 as a target for mRNA silencing is supported by at least the following findings: ALAS1 mRNA is strongly upregulated during an attack; panhematin down modulates ALAS-1; and addition of heme to liver cells in culture leads to reduced ALAS-1 mRNA. Several findings also indicate that suppression of ALAS1 mRNA can be achieved by targeting the liver. For example, liver transplant has been shown to be curative; and liver derived metabolites drive attacks (see e.g., Dar et al. Hepatobiliary Pancreat Dis Int. 9:93-6 (2010); Dowman et al. Ann Intern Med 154:571-2 (2011); and Wu et al. Genes Dev 23:2201-2209 (2009). Thus, reducing expression of ALAS1, e.g., in the liver, using iRNA compositions can be used to treat a porphyria. In certain embodiments, iRNA compositions can be used for prophylaxis and acute treatment of porphyrias. For example, iRNA compositions can be used prophylactically in a recurrent attack setting to induce long-term or chronic suppression of ALAS1 expression (leading to long-term or chronic suppression of ALA/PBG), and thus blunting the recurrent ALAS1 upregulation that drives the attacks. Such prophylactic treatment can reduce the number and the severity of the attacks. During an acute attack setting, administration of an iRNA composition can treat an acute attack, e.g., by reducing the levels of ALA/PBG.

[0330] The present disclosure provides methods and iRNA compositions for modulating the expression of an ALAS1 gene. In certain embodiments, expression of ALAS1 is reduced or inhibited using an ALAS1-specific iRNA, thereby leading to a decreased expression of an ALAS1 gene. Reduced expression of an ALAS1 gene may reduce the level of one or more porphyrin precursors, porphyrins, or porphyrin products or metabolites. Decreased expression of an ALAS1 gene, as well as related decreases in the level of one or more porphyrin precursors and/or porphyrins, can be useful in treating disorders related to ALAS1 expression, e.g., porphyrias.

[0331] The iRNAs of the compositions featured herein include an RNA strand (the antisense strand) having a region which is 30 nucleotides or less in length, i.e., 15-30 nucleotides in length, generally 19-24 nucleotides in length, which region is substantially complementary to at least part of an mRNA transcript of an ALAS1 gene (also referred to herein as an “ALAS1-specific iRNA”). The use of such an iRNA enables the targeted degradation of mRNAs of genes that are implicated in pathologies associated with ALAS1 expression in mammals, e.g., porphyrias such as ALA dehydratase deficiency porphyria (also known as Doss porphyria or plumboporphyria) or acute intermittent porphyria. Very low dosages of ALAS1-specific iRNAs can specifically and efficiently mediate RNAi, resulting in significant inhibition of expression of an ALAS1 gene. iRNAs targeting ALAS1 can specifically and efficiently mediate RNAi, resulting in significant inhibition of expression of an ALAS1 gene, e.g., in cell based assays. Thus, methods and compositions including these iRNAs are useful for treating pathological processes related to ALAS1 expression, such as porphyrias (e.g., X-linked sideroblastic anemia (XLSA), ALA deyhdratase deficiency porphyria (Doss porphyria), acute intermittent porphyria (AIP), congenital erythropoietic porphyria, prophyria cutanea tarda, hereditary coproporphyria (coproporphyria), variegate porphyria, erythropoietic protoporphyria (EPP), and transient erythroporphyria of infancy).

[0332] The following description discloses how to make and use compositions containing iRNAs to inhibit the expression of an ALAS1 gene, as well as compositions and methods for treating diseases and disorders caused by or modulated by the expression of this gene. Embodiments of the pharmaceutical compositions featured in the invention include an iRNA having an antisense strand comprising a region which is 30 nucleotides or less in length, generally 19-24 nucleotides in length, which region is substantially complementary to at least part of an RNA transcript of an ALAS1 gene, together with a pharmaceutically acceptable carrier. Embodiments of compositions featured in the invention also include an iRNA having an antisense strand having a region of complementarity which is 30 nucleotides or less in length, generally 19-24 nucleotides in length, and is substantially complementary to at least part of an RNA transcript of an ALAS1 gene.

[0333] Accordingly, in some aspects, pharmaceutical compositions containing an ALAS1 iRNA and a pharmaceutically acceptable carrier, methods of using the compositions to inhibit expression of an ALAS1 gene, and methods of using the pharmaceutical compositions to treat disorders related to ALAS1 expression are featured in the invention.

### I. DEFINITIONS

[0334] For convenience, the meaning of certain terms and phrases used in the specification, examples, and appended claims, are provided below. If there is an apparent discrepancy between the usage of a term in other parts of this specification and its definition provided in this section, the definition in this section shall prevail.

[0335] “G,” “C,” “A,” “T” and “U” each generally stand for a nucleotide that contains guanine, cytosine, adenine, thymidine and uracil as a base, respectively. However, it will be understood that the term “ribonucleotide” or “nucleotide” can also refer to a modified nucleotide, as further detailed below, or a surrogate replacement moiety. The skilled person is well aware that guanine, cytosine, adenine, and uracil may be replaced by other moieties without substantially altering the base pairing properties of an oligonucleotide comprising a nucleotide bearing such replacement moiety. For example, without limitation, a nucleotide comprising inosine as its base may base pair with nucleotides containing adenine, cytosine, or uracil. Hence, nucleotides containing uracil, guanine, or adenine may be replaced in the nucleotide sequences of dsRNA featured in the invention by a nucleotide containing, for example, inosine. In another example, adenine and cytosine anywhere in the oligonucleotide can be replaced with guanine and uracil, respectively to form G-U Wobble base pairing with the target mRNA. Sequences containing such replacement moieties are suitable for the compositions and methods featured in the invention.

As used herein, “ALAS1” (also known as ALAS-1; δ-aminolevulinate synthase 1; 6-ALA synthase 1; 5′-aminolevulinic acid synthase 1; ALAS-H; ALASH; ALAS-N; ALAS3; EC2.3.1.37; 5-aminolevulinate synthase, nonspecific, mitochondrial; ALAS; MIG4; OTTHUMP00000212619; OTTHUMP00000212620; OTTHUMP00000212621; OTTHUMP00000212622; migration-inducing protein 4; EC 2.3.1) refers to a nuclear-encoded mitochondrial enzyme that is the first and typically rate-limiting enzyme in the mammalian heme biosynthetic pathway. ALAS1 catalyzes the condensation of glycine with succinyl-CoA to form δ-aminolevulinic acid (ALA). The human ALAS1 gene is expressed ubiquitously, is found on chromosome 3p21.1 and typically encodes a sequence of 640 amino acids. In contrast, the ALAS-2 gene, which encodes an isozyme, is expressed only in erythrocytes, is found on chromoxome Xp11.21, and typicallyencodes a sequence of 550 amino acids. As used herein an “ALAS1 protein” means any protein variant of ALAS1 from any species (e.g., human, mouse, non-human primate), as well as any mutants and fragments thereof that retain an ALAS1 activity. Similarly, an “ALAS1 transcript” refers to any transcript variant of ALAS1, from any species (e.g., human, mouse, non-human primate). A sequence of a human ALAS1 mRNA transcript can be found at NM_000688.4 (FIG. 3A and FIG. 3B; SEQ ID NO:1). Another human ALAS1 mRNA transcript, can be found at NM_000688.5 (FIG. 4A and FIG. 4B; SEQ ID NO:382). The level of the mature encoded ALAS1 protein is regulated by heme: high levels of heme down-regulate the mature enzyme in mitochondria while low heme levels up-regulate. Multiple alternatively spliced variants, encoding the same protein, have been identified.

[0336] As used herein, the term “iRNA,” “RNAi”, “iRNA agent,” or “RNAi agent” refers to an agent that contains RNA as that term is defined herein, and which mediates the targeted cleavage of an RNA transcript, e.g., via an RNA-induced silencing complex (RISC) pathway. In one embodiment, an iRNA as described herein effects inhibition of ALAS1 expression. Inhibition of ALAS1 expression may be assessed based on a reduction in the level of ALAS1 mRNA or a reduction in the level of the ALAS1 protein. As used herein, “target sequence” refers to a contiguous portion of the nucleotide sequence of an mRNA molecule formed during the transcription of an ALAS1 gene, including mRNA that is a product of RNA processing of a primary transcription product. The target portion of the sequence will be at least long enough to serve as a substrate for iRNA-directed cleavage at or near that portion. For example, the target sequence will generally be from 9-36 nucleotides in length, e.g., 15-30 nucleotides in length, including all sub-ranges therebetween. As non-limiting examples, the target sequence can be from 15-30 nucleotides, 15-26 nucleotides, 15-23 nucleotides, 15-22 nucleotides, 15-21 nucleotides, 15-20 nucleotides, 15-19 nucleotides, 15-18 nucleotides, 15-17 nucleotides, 18-30 nucleotides, 18-26 nucleotides, 18-23 nucleotides, 18-22 nucleotides, 18-21 nucleotides, 18-20 nucleotides, 19-30 nucleotides, 19-26 nucleotides, 19-23 nucleotides, 19-22 nucleotides, 19-21 nucleotides, 19-20 nucleotides, 20-30 nucleotides, 20-26 nucleotides, 20-25 nucleotides, 20-24 nucleotides, 20-23 nucleotides, 20-22 nucleotides, 20-21 nucleotides, 21-30 nucleotides, 21-26 nucleotides, 21-25 nucleotides, 21-24 nucleotides, 21-23 nucleotides, or 21-22 nucleotides.

[0337] As used herein, the term “strand comprising a sequence” refers to an oligonucleotide comprising a chain of nucleotides that is described by the sequence referred to using the standard nucleotide nomenclature.

[0338] As used herein, and unless otherwise indicated, the term “complementary,” when used to describe a first nucleotide sequence in relation to a second nucleotide sequence, refers to the ability of an oligonucleotide or polynucleotide comprising the first nucleotide sequence to hybridize and form a duplex structure under certain conditions with an oligonucleotide or polynucleotide comprising the second nucleotide sequence, as will be understood by the skilled person. Such conditions can, for example, be stringent conditions, where stringent conditions may include: 400 mM NaCl, 40 mM PIPES pH 6.4, 1 mM EDTA, 50° C. or 70° C. for 12-16 hours followed by washing. Other conditions, such as physiologically relevant conditions as may be encountered inside an organism, can apply. The skilled person will be able to determine the set of conditions most appropriate for a test of complementarity of two sequences in accordance with the ultimate application of the hybridized nucleotides.

[0339] Complementary sequences within an iRNA, e.g., within a dsRNA as described herein, include base-pairing of the oligonucleotide or polynucleotide comprising a first nucleotide sequence to an oligonucleotide or polynucleotide comprising a second nucleotide sequence over the entire length of one or both nucleotide sequences. Such sequences can be referred to as “fully complementary” with respect to each other herein. However, where a first sequence is referred to as “substantially complementary” with respect to a second sequence herein, the two sequences can be fully complementary, or they may form one or more, but generally not more than 5, 4, 3 or 2 mismatched base pairs upon hybridization for a duplex up to 30 base pairs, while retaining the ability to hybridize under the conditions most relevant to their ultimate application, e.g., inhibition of gene expression via a RISC pathway. However, where two oligonucleotides are designed to form, upon hybridization, one or more single stranded overhangs, such overhangs shall not be regarded as mismatches with regard to the determination of complementarity. For example, a dsRNA comprising one oligonucleotide 21 nucleotides in length and another oligonucleotide 23 nucleotides in length, wherein the longer oligonucleotide comprises a sequence of 21 nucleotides that is fully complementary to the shorter oligonucleotide, may yet be referred to as “fully complementary” for the purposes described herein.

[0340] “Complementary” sequences, as used herein, may also include, or be formed entirely from, non-Watson-Crick base pairs and/or base pairs formed from non-natural and modified nucleotides, in as far as the above requirements with respect to their ability to hybridize are fulfilled. Such non-Watson-Crick base pairs includes, but are not limited to, G:U Wobble or Hoogstein base pairing.

[0341] The terms “complementary,” “fully complementary” and “substantially complementary” herein may be used with respect to the base matching between the sense strand and the antisense strand of a dsRNA, or between the antisense strand of an iRNA agent and a target sequence, as will be understood from the context of their use.

[0342] As used herein, a polynucleotide that is “substantially complementary to at least part of” a messenger RNA (mRNA) refers to a polynucleotide that is substantially complementary to a contiguous portion of the mRNA of interest (e.g., an mRNA encoding an ALAS1 protein). For example, a polynucleotide is complementary to at least a part of an ALAS1 mRNA if the sequence is substantially complementary to a non-interrupted portion of an mRNA encoding ALAS1. As another example, a polynucleotide is complementary to at least a part of an ALAS1 mRNA if the sequence is substantially complementary to a non-interrupted portion of an mRNA encoding ALAS1.

[0343] The term “double-stranded RNA” or “dsRNA,” as used herein, refers to an iRNA that includes an RNA molecule or complex of molecules having a hybridized duplex region that comprises two anti-parallel and substantially complementary nucleic acid strands, which will be referred to as having “sense” and “antisense” orientations with respect to a target RNA. The duplex region can be of any length that permits specific degradation of a desired target RNA, e.g., through a RISC pathway, but will typically range from 9 to 36 base pairs in length, e.g., 15-30 base pairs in length. Considering a duplex between 9 and 36 base pairs, the duplex can be any length in this range, for example, 9, 10, 11, 12, 13, 14, 15, 16, 17, 18, 19, 20, 21, 22, 23, 24, 25, 26, 27, 28, 29, 30, 31, 32, 33, 34, 35, or 36 and any sub-range therein between, including, but not limited to 15-30 base pairs, 15-26 base pairs, 15-23 base pairs, 15-22 base pairs, 15-21 base pairs, 15-20 base pairs, 15-19 base pairs, 15-18 base pairs, 15-17 base pairs, 18-30 base pairs, 18-26 base pairs, 18-23 base pairs, 18-22 base pairs, 18-21 base pairs, 18-20 base pairs, 19-30 base pairs, 19-26 base pairs, 19-23 base pairs, 19-22 base pairs, 19-21 base pairs, 19-20 base pairs, 20-30 base pairs, 20-26 base pairs, 20-25 base pairs, 20-24 base pairs, 20-23 base pairs, 20-22 base pairs, 20-21 base pairs, 21-30 base pairs, 21-26 base pairs, 21-25 base pairs, 21-24 base pairs, 21-23 base pairs, or 21-22 base pairs. dsRNAs generated in the cell by processing with Dicer and similar enzymes are generally in the range of 19-22 base pairs in length. One strand of the duplex region of a dsDNA comprises a sequence that is substantially complementary to a region of a target RNA. The two strands forming the duplex structure can be from a single RNA molecule having at least one self-complementary region, or can be formed from two or more separate RNA molecules. Where the duplex region is formed from two strands of a single molecule, the molecule can have a duplex region separated by a single stranded chain of nucleotides (herein referred to as a “hairpin loop”) between the 3′-end of one strand and the 5′-end of the respective other strand forming the duplex structure. The hairpin loop can comprise at least one unpaired nucleotide; in some embodiments the hairpin loop can comprise at least 3, at least 4, at least 5, at least 6, at least 7, at least 8, at least 9, at least 10, at least 20, at least 23 or more unpaired nucleotides. Where the two substantially complementary strands of a dsRNA are comprised by separate RNA molecules, those molecules need not, but can be covalently connected. Where the two strands are connected covalently by means other than a hairpin loop, the connecting structure is referred to as a “linker.” The term “siRNA” is also used herein to refer to a dsRNA as described above.

[0344] In another embodiment, the iRNA agent may be a “single-stranded siRNA” that is introduced into a cell or organism to inhibit a target mRNA. Single-stranded RNAi agents bind to the RISC endonuclease Argonaute 2, which then cleaves the target mRNA. The single-stranded siRNAs are generally 15-30 nucleotides and are chemically modified. The design and testing of single-stranded siRNAs are described in U.S. Pat. No. 8,101,348 and in Lima et al., (2012) Cell 150: 883-894, the entire contents of each of which are hereby incorporated herein by reference. Any of the antisense nucleotide sequences described herein (e.g., sequences provided in Tables 2, 3, 6, 7, 8, 9, 14, 15, 18 and 20 or in Tables 21-40) may be used as a single-stranded siRNA as described herein or as chemically modified by the methods described in Lima et al., (2012) Cell 150:883-894.

[0345] In another aspect, the RNA agent is a “single-stranded antisense RNA molecule”. An single-stranded antisense RNA molecule is complementary to a sequence within the target mRNA. Single-stranded antisense RNA molecules can inhibit translation in a stoichiometric manner by base pairing to the mRNA and physically obstructing the translation machinery, see Dias, N. et al., (2002) Mol Cancer Ther 1:347-355. Alternatively, the single-stranded antisense molecules inhibit a target mRNA by hydridizing to the target and cleaving the target through an RNaseH cleavage event. The single-stranded antisense RNA molecule may be about 10 to about 30 nucleotides in length and have a sequence that is complementary to a target sequence. For example, the single-stranded antisense RNA molecule may comprise a sequence that is at least about 10, 11, 12, 13, 14, 15, 16, 17, 18, 19, 20, or more contiguous nucleotides from any one of the antisense nucleotide sequences described herein, e.g., sequences provided in any one of Tables 2, 3, 6, 7, 8, 9, 14, 15, 18 and 20 or in Tables 21-40.

[0346] The skilled artisan will recognize that the term “RNA molecule” or “ribonucleic acid molecule” encompasses not only RNA molecules as expressed or found in nature, but also analogs and derivatives of RNA comprising one or more ribonucleotide/ribonucleoside analogs or derivatives as described herein or as known in the art. Strictly speaking, a “ribonucleoside” includes a nucleoside base and a ribose sugar, and a “ribonucleotide” is a ribonucleoside with one, two or three phosphate moieties. However, the terms “ribonucleoside” and “ribonucleotide” can be considered to be equivalent as used herein. The RNA can be modified in the nucleobase structure, in the ribose structure, or in the ribose-phosphate backbone structure, e.g., as described herein below. However, the molecules comprising ribonucleoside analogs or derivatives must retain the ability to form a duplex. As non-limiting examples, an RNA molecule can also include at least one modified ribonucleoside including but not limited to a 2′-O-methyl modified nucleostide, a nucleoside comprising a 5′ phosphorothioate group, a terminal nucleoside linked to a cholesteryl derivative or dodecanoic acid bisdecylamide group, a locked nucleoside, an abasic nucleoside, an acyclic nucleoside, a 2′-deoxy-2′-fluoro modified nucleoside, a 2′-amino-modified nucleoside, 2′-alkyl-modified nucleoside, morpholino nucleoside, a phosphoramidate or a non-natural base comprising nucleoside, or any combination thereof. Alternatively, an RNA molecule can comprise at least two modified ribonucleosides, at least 3, at least 4, at least 5, at least 6, at least 7, at least 8, at least 9, at least 10, at least 15, at least 20 or more, up to the entire length of the dsRNA molecule. The modifications need not be the same for each of such a plurality of modified ribonucleosides in an RNA molecule. In one embodiment, modified RNAs contemplated for use in methods and compositions described herein are peptide nucleic acids (PNAs) that have the ability to form the required duplex structure and that permit or mediate the specific degradation of a target RNA, e.g., via a RISC pathway.

[0347] In one aspect, a modified ribonucleoside includes a deoxyribonucleoside. In such an instance, an iRNA agent can comprise one or more deoxynucleosides, including, for example, a deoxynucleoside overhang(s), or one or more deoxynucleosides within the double stranded portion of a dsRNA. In certain embodiments, the RNA molecule comprises a percentage of deoxyribonucleoses of at least 5, 10, 15, 20, 25, 30, 35, 40, 45, 50, 55, 60, 65, 70, 75, 80, 85, 90, 95% or higher (but not 100%) deoxyribonucleosides, e.g., in one or both strands. In other embodiments, the term “iRNA” does not encompass a double stranded DNA molecule (e.g., a naturally-occurring double stranded DNA molecule or a 100% deoxynucleoside-containing DNA molecule). In one aspect, an RNA interference agent includes a single stranded RNA that interacts with a target RNA sequence to direct the cleavage of the target RNA. Without wishing to be bound by theory, long double stranded RNA introduced into cells is broken down into siRNA by a Type III endonuclease known as Dicer (Sharp et al., Genes Dev. 2001, 15:485). Dicer, a ribonuclease-III-like enzyme, processes the dsRNA into 19-23 base pair short interfering RNAs with characteristic two base 3′ overhangs (Bernstein, et al., (2001) Nature 409:363). The siRNAs are then incorporated into an RNA-induced silencing complex (RISC) where one or more helicases unwind the siRNA duplex, enabling the complementary antisense strand to guide target recognition (Nykanen, et al., (2001) Cell 107:309). Upon binding to the appropriate target mRNA, one or more endonucleases within the RISC cleaves the target to induce silencing (Elbashir, et al., (2001) Genes Dev. 15:188). Thus, in one aspect the invention relates to a single stranded RNA that promotes the formation of a RISC complex to effect silencing of the target gene.

[0348] As used herein, the term “nucleotide overhang” refers to at least one unpaired nucleotide that protrudes from the duplex structure of an iRNA, e.g., a dsRNA. For example, when a 3′-end of one strand of a dsRNA extends beyond the 5′-end of the other strand, or vice versa, there is a nucleotide overhang. A dsRNA can comprise an overhang of at least one nucleotide; alternatively the overhang can comprise at least two nucleotides, at least three nucleotides, at least four nucleotides, at least five nucleotides or more. A nucleotide overhang can comprise or consist of a nucleotide/nucleoside analog, including a deoxynucleotide/nucleoside. The overhang(s) may be on the sense strand, the antisense strand or any combination thereof. Furthermore, the nucleotide(s) of an overhang can be present on the 5′ end, 3′ end or both ends of either an antisense or sense strand of a dsRNA.

[0349] In one embodiment, the antisense strand of a dsRNA has a 1-10 nucleotide overhang at the 3′ end and/or the 5′ end. In one embodiment, the sense strand of a dsRNA has a 1-10 nucleotide overhang at the 3′ end and/or the 5′ end. In another embodiment, one or more of the nucleotides in the overhang is replaced with a nucleoside thiophosphate.

[0350] The terms “blunt” or “blunt ended” as used herein in reference to a dsRNA mean that there are no unpaired nucleotides or nucleotide analogs at a given terminal end of a dsRNA, i.e., no nucleotide overhang. One or both ends of a dsRNA can be blunt. Where both ends of a dsRNA are blunt, the dsRNA is said to be blunt ended. To be clear, a “blunt ended” dsRNA is a dsRNA that is blunt at both ends, i.e., no nucleotide overhang at either end of the molecule. Most often such a molecule will be double-stranded over its entire length.

[0351] The term “antisense strand” or “guide strand” refers to the strand of an iRNA, e.g., a dsRNA, which includes a region that is substantially complementary to a target sequence. As used herein, the term “region of complementarity” refers to the region on the antisense strand that is substantially complementary to a sequence, for example a target sequence, as defined herein. Where the region of complementarity is not fully complementary to the target sequence, the mismatches may be in the internal or terminal regions of the molecule. Generally, the most tolerated mismatches are in the terminal regions, e.g., within 5, 4, 3, or 2 nucleotides of the 5′ and/or 3′ terminus.

[0352] The term “sense strand,” or “passenger strand” as used herein, refers to the strand of an iRNA that includes a region that is substantially complementary to a region of the antisense strand as that term is defined herein.

[0353] As used herein, the term “SNALP” refers to a stable nucleic acid-lipid particle. A SNALP represents a vesicle of lipids coating a reduced aqueous interior comprising a nucleic acid such as an iRNA or a plasmid from which an iRNA is transcribed. SNALPs are described, e.g., in U.S. Patent Application Publication Nos. 20060240093, 20070135372, and in International Application No. WO 2009082817. These applications are incorporated herein by reference in their entirety.

[0354] “Introducing into a cell,” when referring to an iRNA, means facilitating or effecting uptake or absorption into the cell, as is understood by those skilled in the art. Absorption or uptake of an iRNA can occur through unaided diffusive or active cellular processes, or by auxiliary agents or devices. The meaning of this term is not limited to cells in vitro; an iRNA may also be “introduced into a cell,” wherein the cell is part of a living organism. In such an instance, introduction into the cell will include the delivery to the organism. For example, for in vivo delivery, iRNA can be injected into a tissue site or administered systemically. In vivo delivery can also be by a β-glucan delivery system, such as those described in U.S. Pat. Nos. 5,032,401 and 5,607,677, and U.S. Publication No. 2005/0281781, which are hereby incorporated by reference in their entirety. In vitro introduction into a cell includes methods known in the art such as electroporation and lipofection. Further approaches are described herein below or known in the art.

[0355] As used herein, the term “modulate the expression of,” refers to at an least partial “inhibition” or partial “activation” of an ALAS1 gene expression in a cell treated with an iRNA composition as described herein compared to the expression of ALAS1 in a control cell. A control cell includes an untreated cell, or a cell treated with a non-targeting control iRNA.

[0356] The terms “activate,” “enhance,” “up-regulate the expression of,” “increase the expression of,” and the like, in so far as they refer to an ALAS1 gene, herein refer to the at least partial activation of the expression of an ALAS1 gene, as manifested by an increase in the amount of ALAS1 mRNA, which may be isolated from or detected in a first cell or group of cells in which an ALAS1 gene is transcribed and which has or have been treated such that the expression of an ALAS1 gene is increased, as compared to a second cell or group of cells substantially identical to the first cell or group of cells but which has or have not been so treated (control cells).

[0357] In one embodiment, expression of an ALAS1 gene is activated by at least about 10%, 15%, 20%, 25%, 30%, 35%, 40%, 45%, or 50% by administration of an iRNA as described herein. In some embodiments, an ALAS1 gene is activated by at least about 60%, 70%, or 80% by administration of an iRNA featured in the invention. In some embodiments, expression of an ALAS1 gene is activated by at least about 85%, 90%, or 95% or more by administration of an iRNA as described herein. In some embodiments, the ALAS1 gene expression is increased by at least 1-fold, at least 2-fold, at least 5-fold, at least 10-fold, at least 50-fold, at least 100-fold, at least 500-fold, at least 1000 fold or more in cells treated with an iRNA as described herein compared to the expression in an untreated cell. Activation of expression by small dsRNAs is described, for example, in Li et al., 2006 Proc. Natl. Acad. Sci. U.S.A. 103:17337-42, and in US20070111963 and US2005226848, each of which is incorporated herein by reference.

[0358] The terms “silence,” “inhibit expression of,” “down-regulate expression of,” “suppress expression of,” and the like, in so far as they refer to an ALAS1 gene, herein refer to the at least partial suppression of the expression of an ALAS1 gene, as assessed, e.g., based on on ALAS1 mRNA expression, ALAS1 protein expression, or another parameter functionally linked to ALAS1 gene expression (e.g., ALA or PBG concentrations in plasma or urine). For example, inhibition of ALAS1 expression may be manifested by a reduction of the amount of ALAS1 mRNA which may be isolated from or detected in a first cell or group of cells in which an ALAS1 gene is transcribed and which has or have been treated such that the expression of an ALAS1 gene is inhibited, as compared to a control. The control may be a second cell or group of cells substantially identical to the first cell or group of cells, except that the second cell or group of cells have not been so treated (control cells). The degree of inhibition is usually expressed as a percentage of a control level, e.g.,

$$\frac{( mRNA in control cells ) - ( mRNA in treated cells )}{( mRNA in control cells )} \cdot 100 \%$$

[0359] Alternatively, the degree of inhibition may be given in terms of a reduction of a parameter that is functionally linked to ALAS1 gene expression, e.g., the amount of protein encoded by an ALAS1 gene, or the level of one or more porphyrins. The reduction of a parameter functionally linked to ALAS1 gene expression may similarly be expressed as a percentage of a control level. In principle, ALAS1 gene silencing may be determined in any cell expressing ALAS1, either constitutively or by genomic engineering, and by any appropriate assay. However, when a reference is needed in order to determine whether a given iRNA inhibits the expression of the ALAS1 gene by a certain degree and therefore is encompassed by the instant invention, the assays provided in the Examples below shall serve as such reference.

[0360] For example, in certain instances, expression of an ALAS1 gene is suppressed by at least about 10%, 15%, 20%, 25%, 30%, 35%, 40%, 45%, or 50% by administration of an iRNA featured in the invention. In some embodiments, an ALAS1 gene is suppressed by at least about 60%, 65%, 70%, 75%, or 80% by administration of an iRNA featured in the invention. In some embodiments, an ALAS1 gene is suppressed by at least about 85%, 90%, 95%, 98%, 99%, or more by administration of an iRNA as described herein.

[0361] As used herein in the context of ALAS1 expression, the terms “treat,” “treating,” “treatment,” and the like, refer to relief from or alleviation of pathological processes related to ALAS1 expression (e.g., pathological processes involving porphyrins or defects in the porphyrin pathway, such as, for example, porphyrias). In the context of the present invention insofar as it relates to any of the other conditions recited herein below (other than pathological processes related to ALAS1expression), the terms “treat,” “treatment,” and the like mean to prevent, relieve or alleviate at least one symptom associated with such condition, or to slow or reverse the progression or anticipated progression of such condition. For example, the methods featured herein, when employed to treat porphyria, may serve to reduce or prevent one or more symptoms associated with porphyria (e.g., pain), to reduce the severity or frequency of attacks associated with porphyria, to reduce the likelihood that an attack of one or more symptoms associated with porphyria will occur upon exposure to a precipitating condition, to shorten an attack associated with porphyria, and/or to reduce the risk of developing conditions associated with porphyria (e.g., hepatocellular cancer or neuropathy (e.g., progressive neuropathy),). Thus, unless the context clearly indicates otherwise, the terms “treat,” “treatment,” and the like are intended to encompass prophylaxis, e.g., prevention of disorders and/or symptoms of disorders related to ALAS1 expression.

[0362] By “lower” in the context of a disease marker or symptom is meant a statistically or clinically significant decrease in such level. The decrease can be, for example, at least 10%, at least 20%, at least 30%, at least 40% or more, and is typically down to a level accepted as within the range of normal for an individual without such disorder.

[0363] As used herein, the phrases “therapeutically effective amount” and “prophylactically effective amount” refer to an amount that provides a therapeutic benefit in the treatment, prevention, or management of pathological processes related to ALAS1expression. The specific amount that is therapeutically effective can be readily determined by an ordinary medical practitioner, and may vary depending on factors known in the art, such as, for example, the type of pathological process, the patient's history and age, the stage of pathological process, and the administration of other agents.

[0364] As used herein, a “pharmaceutical composition” comprises a pharmacologically effective amount of an iRNA and a pharmaceutically acceptable carrier. As used herein, “pharmacologically effective amount,” “therapeutically effective amount” or simply “effective amount” refers to that amount of an iRNA effective to produce the intended pharmacological, therapeutic or preventive result. For example, in a method of treating a disorder related to ALAS1 expression (e.g., in a method of treating a porphyria), an effective amount includes an amount effective to reduce one or more symptoms associated with a porphyria, an amount effective to reduce the frequency of attacks, an amount effective to reduce the likelihood that an attack of one or more symptoms associated with porphyria will occur upon exposure to a precipitating factor, or an amount effective to reduce the risk of developing conditions associated with porphyria (e.g., neuropathy (e.g., progressive neuropathy), hepatocellular cancer). For example, if a given clinical treatment is considered effective when there is at least a 10% reduction in a measurable parameter associated with a disease or disorder, a therapeutically effective amount of a drug for the treatment of that disease or disorder is the amount necessary to effect at least a 10% reduction in that parameter. For example, a therapeutically effective amount of an iRNA targeting ALAS1 can reduce ALAS1 protein levels by any measurable amount, e.g., by at least 10%, 20%, 30%, 40% or 50%.

[0365] The term “pharmaceutically acceptable carrier” refers to a carrier for administration of a therapeutic agent. Such carriers include, but are not limited to, saline, buffered saline, dextrose, water, glycerol, ethanol, and combinations thereof. The term specifically excludes cell culture medium. For drugs administered orally, pharmaceutically acceptable carriers include, but are not limited to pharmaceutically acceptable excipients such as inert diluents, disintegrating agents, binding agents, lubricating agents, sweetening agents, flavoring agents, coloring agents and preservatives. Suitable inert diluents include sodium and calcium carbonate, sodium and calcium phosphate, and lactose, while corn starch and alginic acid are suitable disintegrating agents. Binding agents may include starch and gelatin, while the lubricating agent, if present, will generally be magnesium stearate, stearic acid or talc. If desired, the tablets may be coated with a material such as glyceryl monostearate or glyceryl distearate, to delay absorption in the gastrointestinal tract. Agents included in drug formulations are described further herein below.

[0366] The term “about” when referring to a number or a numerical range means that the number or numerical range referred to is an approximation within experimental variability (or within statistical experimental error), and thus the number or numerical range may vary from, for example, between 1% and 15% of the stated number or numerical range.

### II. IRNA AGENTS

[0367] Described herein are iRNA agents that inhibit the expression of an ALAS1gene. In one embodiment, the iRNA agent includes double-stranded ribonucleic acid (dsRNA) molecules for inhibiting the expression of an ALAS1 gene in a cell or in a subject (e.g., in a mammal, e.g., in a human having a porphyria), where the dsRNA includes an antisense strand having a region of complementarity which is complementary to at least a part of an mRNA formed in the expression of an ALAS1gene, and where the region of complementarity is 30 nucleotides or less in length, generally 19-24 nucleotides in length, and where the dsRNA, upon contact with a cell expressing the ALAS1 gene, inhibits the expression of the ALAS1 gene by at least 10% as assayed by, for example, a PCR or branched DNA (bDNA)-based method, or by a protein-based method, such as by Western blot. In one embodiment, the iRNA agent activates the expression of an ALAS1 gene in a cell or mammal Expression of an ALAS1 gene in cell culture, such as in COS cells, HeLa cells, primary hepatocytes, HepG2 cells, primary cultured cells or in a biological sample from a subject can be assayed by measuring ALAS1 mRNA levels, such as by bDNA or TaqMan assay, or by measuring protein levels, such as by immunofluorescence analysis, using, for example, Western Blotting or flow cytometric techniques.

[0368] A dsRNA includes two RNA strands that are sufficiently complementary to hybridize to form a duplex structure under conditions in which the dsRNA will be used. One strand of a dsRNA (the antisense strand) includes a region of complementarity that is substantially complementary, and generally fully complementary, to a target sequence, derived from the sequence of an mRNA formed during the expression of an ALAS1 gene. The other strand (the sense strand) includes a region that is complementary to the antisense strand, such that the two strands hybridize and form a duplex structure when combined under suitable conditions. Generally, the duplex structure is between 15 and 30 inclusive, more generally between 18 and 25 inclusive, yet more generally between 19 and 24 inclusive, and most generally between 19 and 21 base pairs in length, inclusive. Similarly, the region of complementarity to the target sequence is between 15 and 30 inclusive, more generally between 18 and 25 inclusive, yet more generally between 19 and 24 inclusive, and most generally between 19 and 21 nucleotides in length, inclusive. In some embodiments, the dsRNA is between 15 and 20 nucleotides in length, inclusive, and in other embodiments, the dsRNA is between 25 and 30 nucleotides in length, inclusive. As the ordinarily skilled person will recognize, the targeted region of an RNA targeted for cleavage will most often be part of a larger RNA molecule, often an mRNA molecule. Where relevant, a “part” of an mRNA target is a contiguous sequence of an mRNA target of sufficient length to be a substrate for RNAi-directed cleavage (i.e., cleavage through a RISC pathway). dsRNAs having duplexes as short as 9 base pairs can, under some circumstances, mediate RNAi-directed RNA cleavage. Most often a target will be at least 15 nucleotides in length, e.g., 15-30 nucleotides in length.

[0369] One of skill in the art will also recognize that the duplex region is a primary functional portion of a dsRNA, e.g., a duplex region of 9 to 36, e.g., 15-30 base pairs. Thus, in one embodiment, to the extent that it becomes processed to a functional duplex of e.g., 15-30 base pairs that targets a desired RNA for cleavage, an RNA molecule or complex of RNA molecules having a duplex region greater than 30 base pairs is a dsRNA. Thus, an ordinarily skilled artisan will recognize that in one embodiment, then, an miRNA is a dsRNA. In another embodiment, a dsRNA is not a naturally occurring miRNA. In another embodiment, an iRNA agent useful to target ALAS1 expression is not generated in the target cell by cleavage of a larger dsRNA.

[0370] A dsRNA as described herein may further include one or more single-stranded nucleotide overhangs. The dsRNA can be synthesized by standard methods known in the art as further discussed below, e.g., by use of an automated DNA synthesizer, such as are commercially available from, for example, Biosearch, Applied Biosystems, Inc. In one embodiment, an ALAS1 gene is a human ALAS1 gene. In another embodiment the ALAS1 gene is a mouse or a rat ALAS1 gene.

[0371] In specific embodiments, the first sequence is a sense strand of a dsRNA that includes a sense sequence disclosed herein, e.g., in Tables 21-40, and the second sequence is an antisense strand of a dsRNA that includes an antisense sequence disclosed herein, e.g., in Tables 21-40.

[0372] In specific embodiments, the first sequence is a sense strand of a dsRNA that includes a sense sequence from Table 2 or Table 3, and the second sequence is an antisense strand of a dsRNA that includes an antisense sequence from Table 2 or Table 3. In embodiments, the first sequence is a sense strand of a dsRNA that includes a sense sequence from Table 2, 3, 6, 7, 8, 9, 14, or 15, and the second sequence is an antisense strand of a dsRNA that includes an antisense sequence from Table 2, 3, 6, 7, 8, 9, 14, or 15. In embodiments, the first sequence is a sense strand of a dsRNA that includes a sense sequence from Table 2, 3, 6, 7, 8, 9, 14, 15, 18 or 20, and the second sequence is an antisense strand of a dsRNA that includes an antisense sequence from Table 2, 3, 6, 7, 8, 9, 14, 15, 18 or 20.

[0373] In one aspect, a dsRNA can include at least sense and antisense nucleotide sequences, whereby the sense strand is selected from the sense sequences provided herein, e.g., in Tables 21-40, and the corresponding antisense strand of the sense strand is selected from the antisense sequences provided herein, e.g., in Tables 21-40.

[0374] In one aspect, a dsRNA can include at least sense and antisense nucleotide sequences, whereby the sense strand is selected from the groups of sequences provided in Tables 2 and 3, and the corresponding antisense strand of the sense strand is selected from Tables 2 and 3. In a further aspect, a dsRNA can include at least sense and antisense nucleotide sequences, whereby the sense strand is selected from the groups of sequences provided in Tables 2, 3, 6, 7, 8, 9, 14, and 15, and the corresponding antisense strand of the sense strand is selected from Tables 2, 3, 6, 7, 8, 9, 14, and 15. In a further aspect, a dsRNA can include at least sense and antisense nucleotide sequences, whereby the sense strand is selected from the groups of sequences provided in Tables 2, 3, 6, 7, 8, 9, 14, 15, 18 and 20, and the corresponding antisense strand of the sense strand is selected from Tables 2, 3, 6, 7, 8, 9, 14, 15, 18 and 20.

[0375] In embodiments, the iRNA is AD-60501, AD-60519, AD-60901, AD-60495, AD-60900, AD-60935, AD-60879, AD-61190, AD-61191, AD-60865, AD-60861, AD-60876, AD-61193, AD-60519, AD-60519, AD-60901, AD-60405, AD-60887, AD-60923, AD-60434, AD-60892, AD-60419, AD-60924, AD-60445, AD-60925, AD-60926, AD-60820, AD-60843, AD-60819, AD-61140, AD-61141, AD-61142, AD-60835, AD-60839, AD-61143, AD-61144, AD-61145, AD-61146, AD-60892, or AD-60419 (e.g., including the nucleotide sequence and/or one or more (e.g., all) of the modifications of the aforesaid dsRNAs). In embodiments, the iRNA comprises an antisense strand that comprises, or consists of, an antisense sequence (including one or more (e.g., all the modifications)) selected from the antisense sequence of AD-60501, AD-60519, AD-60901, AD-60495, AD-60900, AD-60935, AD-60879, AD-61190, AD-61191, AD-60865, AD-60861, AD-60876, AD-61193, AD-60519, AD-60519, AD-60901, AD-60405, AD-60887, AD-60923, AD-60434, AD-60892, AD-60419, AD-60924, AD-60445, AD-60925, AD-60926, AD-60820, AD-60843, AD-60819, AD-61140, AD-61141, AD-61142, AD-60835, AD-60839, AD-61143, AD-61144, AD-61145, AD-61146, AD-60892, or AD-60419. In embodiments, the iRNA comprises a sense strand that comprises, or consists of, a sense sequence (and/or one or more (e.g., all) of the modifications)) selected from AD-60501, AD-60519, AD-60901, AD-60495, AD-60900, AD-60935, AD-60879, AD-61190, AD-61191, AD-60865, AD-60861, AD-60876, AD-61193, AD-60519, AD-60519, AD-60901, AD-60405, AD-60887, AD-60923, AD-60434, AD-60892, AD-60419, AD-60924, AD-60445, AD-60925, AD-60926, AD-60820, AD-60843, AD-60819, AD-61140, AD-61141, AD-61142, AD-60835, AD-60839, AD-61143, AD-61144, AD-61145, AD-61146, AD-60892, or AD-60419.

[0376] In embodiments, the iRNA comprises (i) an antisense strand that comprises, or consists of, the sequence of UAAGAUGAGACACUCUUUCUGGU or UAAGAUGAGACACUCTUUCUGGU and/or (ii) a sense strand that comprises, or consists of, the sequence of CAGAAAGAGUGUCUCAUCUUA. In embodiments, one or more nucleotides of the antisense strand and/or sense strand are modified as described herein.

[0377] In embodiments, the iRNA comprises (i) an antisense strand that comprises, or consists of, the antisense sequence of AD-60489 and/or (ii) a sense strand that comprises, or consists of, the sense sequence of AD-60489 (and/or one or more (e.g., all) of the modifications of the sense strand and/or antisense strand of AD-60489).

[0378] In embodiments, the iRNA comprises (i) an antisense strand that comprises, or consists of, the antisense sequence of AD-60519 and/or (ii) a sense strand that comprises, or consists of, the sense sequence of AD-60519 (and/or one or more (e.g., all) of the modifications of the sense strand and/or antisense strand of AD-60489).

[0379] In embodiments, the iRNA comprises (i) an antisense strand that comprises, or consists of, the antisense sequence of AD-61193 and/or (ii) a sense strand that comprises, or consists of, the sense sequence of AD-61193 (and/or one or more (e.g., all) of the modifications of the sense strand and/or antisense strand of AD-60489).

[0380] In embodiments, the iRNA comprises (i) an antisense strand that comprises, or consists of, the antisense sequence of AD-60819 and/or (ii) a sense sequence that comprises, or consists of, the sense sequence of AD-60819 (and/or one or more (e.g., all) of the modifications of the sense strand and/or antisense strand of AD-60489).

[0381] In embodiments, the iRNA for inhibiting expression of ALAS1 is provided, wherein the dsRNA comprises (i) an antisense strand that comprises, or consists of, the antisense sequence of AD-60489, AD-60519, AD-61193, or AD-60819 (or a corresponding unmodified antisense sequence) and/or (ii) a sense strand that comprises, or consists of, the sense sequence of AD-60489, AD-60519, AD-61193, or AD-60819 (or a corresponding unmodified antisense sequence). In embodiments, the iRNA comprises (i) an antisense strand that consists of the antisense sequence of AD-60489, AD-60519, AD-61193, or AD-60819 and/or (ii) a sense strand that consists of the sense sequence of AD-60489, AD-60519, AD-61193, or AD-60819, except that the antisense strand and/or sense strand of the dsRNA differs by 1, 2, or 3 nucleotides from the corresponding antisense and/or sense sequence of AD-60489, AD-60519, AD-61193, or AD-60819.

[0382] The sequences and modifications of AD-60489, AD-60519, AD-61193, and AD-60819 are shown in Table 44 disclosed herein.

[0383] In one embodiment, the iRNA is ALN-60519. ALN-60519 is a chemically synthesized double stranded oligonucleotide covalently linked to a ligand containing three N-acetylgalactosamine (GalNAc) residues (depicted in FIG. 57). In one embodiment, all nucleotides of ALN-60519 are 2′-OMe or 2′-F modified and are connected through 3′-5′ phosphodiester linkages, thus forming the sugar-phosphate backbone of the oligonucleotide. The sense strand and the antisense strand of ALN-60519 contain 21 and 23 nucleotides, respectively. The 3′-end of the sense strand of ALN-60519 is conjugated to the triantennary GalNAc moiety (referred to as L96) through a phosphodiester linkage. The antisense strand contains four phosphorothioate linkages—two at the 3′ end and two at the 5′ end. The sense strand of ALN-60519 contains two phosphorothioate linkages at the 5′ end. The 21 nucleotides of the sense strand of ALN-60519 hybridize with the complementary 21 nucleotides of the antisense strand, thus forming 21 nucleotide base pairs and a two-base overhang at the 3′-end of the antisense strand. The two single strands, the sense strand and the antisense strand, of ALN-60519 can be synthesized by conventional solid phase oligonucleotide synthesis, employing standard phosphoramidite chemistry with the 5′-hydroxyl group protected as dimethoxytriphenylmethyl (DMT) ether. Each strand can be assembled from the 3′ to the 5′ terminus by sequential addition of protected nucleoside phosphoramidites.

[0384] In these aspects, one of the two sequences is complementary to the other of the two sequences, with one of the sequences being substantially complementary to a sequence of an mRNA generated by the expression of an ALAS1 gene gene. As such, a dsRNA will include two oligonucleotides, where one oligonucleotide is described herein as the sense strand, and the second oligonucleotide is described as the corresponding antisense strand. As described elsewhere herein and as known in the art, the complementary sequences of a dsRNA can also be contained as self-complementary regions of a single nucleic acid molecule, as opposed to being on separate oligonucleotides.

[0385] The skilled person is well aware that dsRNAs having a duplex structure of between 20 and 23, but specifically 21, base pairs have been hailed as particularly effective in inducing RNA interference (Elbashir et al., EMBO 2001, 20:6877-6888). However, others have found that shorter or longer RNA duplex structures can be effective as well. In the embodiments described above, by virtue of the nature of the oligonucleotide sequences provided in the tables herein, dsRNAs described herein can include at least one strand of a length of minimally 21 nucleotides. It can be reasonably expected that shorter duplexes having one of the sequences of disclosed herein minus only a few nucleotides on one or both ends may be similarly effective as compared to the dsRNAs described above. Hence, dsRNAs having a partial sequence of at least 15, 16, 17, 18, 19, 20, or more contiguous nucleotides from one of the sequences disclosed herein, and differing in their ability to inhibit the expression of an ALAS1gene by not more than 5, 10, 15, 20, 25, or 30% inhibition from a dsRNA comprising the full sequence, are contemplated according to the invention.

[0386] In addition, the RNAs provided in the tables herein, identify a site in an ALAS1 transcript that is susceptible to RISC-mediated cleavage. As such, the present invention further features iRNAs that target within one of such sequences. As used herein, an iRNA is said to target within a particular site of an RNA transcript if the iRNA promotes cleavage of the transcript anywhere within that particular site. Such an iRNA will generally include at least 15 contiguous nucleotides from one of the sequences provided herein, e.g., in Tables 2, 3, 6, 7, 8, 9, 14, 15, 18, 20, and in Tables 21-40, coupled to additional nucleotide sequences taken from the region contiguous to the selected sequence in an ALAS1gene.

[0387] While a target sequence is generally 15-30 nucleotides in length, there is wide variation in the suitability of particular sequences in this range for directing cleavage of any given target RNA. Various software packages and the guidelines set out herein provide guidance for the identification of optimal target sequences for any given gene target, but an empirical approach can also be taken in which a “window” or “mask” of a given size (as a non-limiting example, 21 nucleotides) is literally or figuratively (including, e.g., in silico) placed on the target RNA sequence to identify sequences in the size range that may serve as target sequences. By moving the sequence “window” progressively one nucleotide upstream or downstream of an initial target sequence location, the next potential target sequence can be identified, until the complete set of possible sequences is identified for any given target size selected. This process, coupled with systematic synthesis and testing of the identified sequences (using assays as described herein or as known in the art) to identify those sequences that perform optimally can identify those RNA sequences that, when targeted with an iRNA agent, mediate the best inhibition of target gene expression. Thus, while the sequences identified, for example, in the tables herein, represent effective target sequences, it is contemplated that further optimization of inhibition efficiency can be achieved by progressively “walking the window” one nucleotide upstream or downstream of the given sequences to identify sequences with equal or better inhibition characteristics.

[0388] Further, it is contemplated that for any sequence identified, e.g., in the tables herein, further optimization can be achieved by systematically either adding or removing nucleotides to generate longer or shorter sequences and testing those and sequences generated by walking a window of the longer or shorter size up or down the target RNA from that point. Again, coupling this approach to generating new candidate targets with testing for effectiveness of iRNAs based on those target sequences in an inhibition assay as known in the art or as described herein can lead to further improvements in the efficiency of inhibition. Further still, such optimized sequences can be adjusted by, e.g., the introduction of modified nucleotides as described herein or as known in the art, addition or changes in overhang, or other modifications as known in the art and/or discussed herein to further optimize the molecule (e.g., increasing serum stability or circulating half-life, increasing thermal stability, enhancing transmembrane delivery, targeting to a particular location or cell type, increasing interaction with silencing pathway enzymes, increasing release from endosomes, etc.) as an expression inhibitor.

[0389] An iRNA as described herein can contain one or more mismatches to the target sequence. In one embodiment, an iRNA as described herein contains no more than 3 mismatches. If the antisense strand of the iRNA contains mismatches to a target sequence, it is preferable that the area of mismatch not be located in the center of the region of complementarity. If the antisense strand of the iRNA contains mismatches to the target sequence, it is preferable that the mismatch be restricted to be within the last 5 nucleotides from either the 5′ or 3′ end of the region of complementarity. For example, for a 23 nucleotide iRNA agent RNA strand which is complementary to a region of an ALAS1 gene, the RNA strand generally does not contain any mismatch within the central 13 nucleotides. The methods described herein or methods known in the art can be used to determine whether an iRNA containing a mismatch to a target sequence is effective in inhibiting the expression of an ALAS1 gene. Consideration of the efficacy of iRNAs with mismatches in inhibiting expression of an ALAS1 gene is important, especially if the particular region of complementarity in an ALAS1 gene is known to have polymorphic sequence variation within the population.

[0390] In one embodiment, at least one end of a dsRNA has a single-stranded nucleotide overhang of 1 to 4, generally 1 or 2 nucleotides. dsRNAs having at least one nucleotide overhang have unexpectedly superior inhibitory properties relative to their blunt-ended counterparts. In yet another embodiment, the RNA of an iRNA, e.g., a dsRNA, is chemically modified to enhance stability or other beneficial characteristics. The nucleic acids featured in the invention may be synthesized and/or modified by methods well established in the art, such as those described in “Current protocols in nucleic acid chemistry,” Beaucage, S. L. et al. (Edrs.), John Wiley & Sons, Inc., New York, N.Y., USA, which is hereby incorporated herein by reference. Modifications include, for example, (a) end modifications, e.g., 5′ end modifications (phosphorylation, conjugation, inverted linkages, etc.) 3′ end modifications (conjugation, DNA nucleotides, inverted linkages, etc.), (b) base modifications, e.g., replacement with stabilizing bases, destabilizing bases, or bases that base pair with an expanded repertoire of partners, removal of bases (abasic nucleotides), or conjugated bases, (c) sugar modifications (e.g., at the 2′ position or 4′ position, or having an acyclic sugar) or replacement of the sugar, as well as (d) backbone modifications, including modification or replacement of the phosphodiester linkages. Specific examples of RNA compounds useful in this invention include, but are not limited to RNAs containing modified backbones or no natural internucleoside linkages. RNAs having modified backbones include, among others, those that do not have a phosphorus atom in the backbone. For the purposes of this specification, and as sometimes referenced in the art, modified RNAs that do not have a phosphorus atom in their internucleoside backbone can also be considered to be oligonucleosides. In particular embodiments, the modified RNA will have a phosphorus atom in its internucleoside backbone.

[0391] Modified RNA backbones include, for example, phosphorothioates, chiral phosphorothioates, phosphorodithioates, phosphotriesters, aminoalkylphosphotriesters, methyl and other alkyl phosphonates including 3′-alkylene phosphonates and chiral phosphonates, phosphinates, phosphoramidates including 3′-amino phosphoramidate and aminoalkylphosphoramidates, thionophosphoramidates, thionoalkylphosphonates, thionoalkylphosphotriesters, and boranophosphates having normal 3′-5′ linkages, 2′-5′ linked analogs of these, and those) having inverted polarity wherein the adjacent pairs of nucleoside units are linked 3′-5′ to 5′-3′ or 2′-5′ to 5′-2′. Various salts, mixed salts and free acid forms are also included.

[0392] Representative U.S. patents that teach the preparation of the above phosphorus-containing linkages include, but are not limited to, U.S. Pat. Nos. 3,687,808; 4,469,863; 4,476,301; 5,023,243; 5,177,195; 5,188,897; 5,264,423; 5,276,019; 5,278,302; 5,286,717; 5,321,131; 5,399,676; 5,405,939; 5,453,496; 5,455,233; 5,466,677; 5,476,925; 5,519,126; 5,536,821; 5,541,316; 5,550,111; 5,563,253; 5,571,799; 5,587,361; 5,625,050; 6,028,188; 6,124,445; 6,160,109; 6,169,170; 6,172,209; 6,239,265; 6,277,603; 6,326,199; 6,346,614; 6,444,423; 6,531,590; 6,534,639; 6,608,035; 6,683,167; 6,858,715; 6,867,294; 6,878,805; 7,015,315; 7,041,816; 7,273,933; 7,321,029; and U.S. Pat. RE39464, each of which is herein incorporated by reference.

[0393] Modified RNA backbones that do not include a phosphorus atom therein have backbones that are formed by short chain alkyl or cycloalkyl internucleoside linkages, mixed heteroatoms and alkyl or cycloalkyl internucleoside linkages, or one or more short chain heteroatomic or heterocyclic internucleoside linkages. These include those having morpholino linkages (formed in part from the sugar portion of a nucleoside); siloxane backbones; sulfide, sulfoxide and sulfone backbones; formacetyl and thioformacetyl backbones; methylene formacetyl and thioformacetyl backbones; alkene containing backbones; sulfamate backbones; methyleneimino and methylenehydrazino backbones; sulfonate and sulfonamide backbones; amide backbones; and others having mixed N, O, S and CH₂ component parts.

[0394] Representative U.S. patents that teach the preparation of the above oligonucleosides include, but are not limited to, U.S. Pat. Nos. 5,034,506; 5,166,315; 5,185,444; 5,214,134; 5,216,141; 5,235,033; 5,64,562; 5,264,564; 5,405,938; 5,434,257; 5,466,677; 5,470,967; 5,489,677; 5,541,307; 5,561,225; 5,596,086; 5,602,240; 5,608,046; 5,610,289; 5,618,704; 5,623,070; 5,663,312; 5,633,360; 5,677,437; and, 5,677,439, each of which is herein incorporated by reference.

[0395] In other RNA mimetics suitable or contemplated for use in iRNAs, both the sugar and the internucleoside linkage, i.e., the backbone, of the nucleotide units are replaced with novel groups. The base units are maintained for hybridization with an appropriate nucleic acid target compound. One such oligomeric compound, an RNA mimetic that has been shown to have excellent hybridization properties, is referred to as a peptide nucleic acid (PNA). In PNA compounds, the sugar backbone of an RNA is replaced with an amide containing backbone, in particular an aminoethylglycine backbone. The nucleobases are retained and are bound directly or indirectly to aza nitrogen atoms of the amide portion of the backbone. Representative U.S. patents that teach the preparation of PNA compounds include, but are not limited to, U.S. Pat. Nos. 5,539,082; 5,714,331; and 5,719,262, each of which is herein incorporated by reference. Further teaching of PNA compounds can be found, for example, in Nielsen et al., Science, 1991, 254, 1497-1500.

[0396] Some embodiments featured in the invention include RNAs with phosphorothioate backbones and oligonucleosides with heteroatom backbones, and in particular —CH₂—NH—CH₂—, —CH₂—N(CH₃)—O—CH₂— [known as a methylene (methylimino) or MMI backbone], —CH₂—O—N(CH₃)—CH₂—, —CH₂—N(CH₃)—N(CH₃)—CH₂— and —N(CH₃)—CH₂—CH₂— [wherein the native phosphodiester backbone is represented as —O—P—O—CH₂—] of the above-referenced U.S. Pat. No. 5,489,677, and the amide backbones of the above-referenced U.S. Pat. No. 5,602,240. In some embodiments, the RNAs featured herein have morpholino backbone structures of the above-referenced U.S. Pat. No. 5,034,506.

[0397] Modified RNAs may also contain one or more substituted sugar moieties. The iRNAs, e.g., dsRNAs, featured herein can include one of the following at the 2′ position: OH; F; O—, S—, or N-alkyl; O—, S—, or N-alkenyl; O—, S- or N-alkynyl; or O-alkyl-O-alkyl, wherein the alkyl, alkenyl and alkynyl may be substituted or unsubstituted C₁ to C₁₀ alkyl or C₂ to C₁₀ alkenyl and alkynyl. Exemplary suitable modifications include O[(CH₂)ₙO]ₘCH₃, O(CH₂).ₙOCH₃, O(CH₂)ₙNH₂, O(CH₂)ₙCH₃, O(CH₂)ₙONH₂, and O(CH₂)ₙON[(CH₂)ₙCH₃)]₂, where n and m are from 1 to about 10. In other embodiments, dsRNAs include one of the following at the 2′ position: C₁ to C₁₀ lower alkyl, substituted lower alkyl, alkaryl, aralkyl, O-alkaryl or O-aralkyl, SH, SCH₃, OCN, Cl, Br, CN, CF₃, OCF₃, SOCH₃, SO₂CH₃, ONO₂, NO₂, N₃, NH₂, heterocycloalkyl, heterocycloalkaryl, aminoalkylamino, polyalkylamino, substituted silyl, an RNA cleaving group, a reporter group, an intercalator, a group for improving the pharmacokinetic properties of an iRNA, or a group for improving the pharmacodynamic properties of an iRNA, and other substituents having similar properties. In some embodiments, the modification includes a 2′-methoxyethoxy (2′-O—CH₂CH₂OCH₃, also known as 2′-O-(2-methoxyethyl) or 2′-MOE) (Martin et al., Helv. Chim. Acta, 1995, 78:486-504) i.e., an alkoxy-alkoxy group. Another exemplary modification is 2′-dimethylaminooxyethoxy, i.e., a O(CH₂)₂ON(CH₃)₂ group, also known as 2′-DMAOE, as described in examples herein below, and 2′-dimethylaminoethoxyethoxy (also known in the art as 2′-O-dimethylaminoethoxyethyl or 2′-DMAEOE), i.e., 2′-O—CH₂—O—CH₂—N(CH₂)₂, also described in examples herein below.

[0398] In other embodiments, an iRNA agent comprises one or more (e.g., about 1, 2, 3, 4, 5, 6, 7, 8, 9, 10, or more) acyclic nucleotides (or nucleosides). In certain embodiments, the sense strand or the antisense strand, or both sense strand and antisense strand, include less than five acyclic nucleotides per strand (e.g., four, three, two or one acyclic nucleotides per strand). The one or more acyclic nucleotides can be found, for example, in the double-stranded region, of the sense or antisense strand, or both strands; at the 5′-end, the 3′-end, both of the 5′ and 3′-ends of the sense or antisense strand, or both strands, of the iRNA agent. In one embodiment, one or more acyclic nucleotides are present at positions 1 to 8 of the sense or antisense strand, or both. In one embodiment, one or more acyclic nucleotides are found in the antisense strand at positions 4 to 10 (e.g., positions 6-8) from the 5′-end of the antisense strand. In another embodiment, the one or more acyclic nucleotides are found at one or both 3′-terminal overhangs of the iRNA agent.

[0399] The term “acyclic nucleotide” or “acyclic nucleoside” as used herein refers to any nucleotide or nucleoside having an acyclic sugar, e.g., an acyclic ribose. An exemplary acyclic nucleotide or nucleoside can include a nucleobase, e.g., a naturally-occurring or a modified nucleobase (e.g., a nucleobase as described herein). In certain embodiments, a bond between any of the ribose carbons (C1, C2, C3, C4, or C5), is independently or in combination absent from the nucleotide. In one embodiment, the bond between C2-C3 carbons of the ribose ring is absent, e.g., an acyclic 2′-3′-seco-nucleotide monomer. In other embodiments, the bond between C1-C2, C3-C4, or C4-05 is absent (e.g., a 1′-2′, 3′-4′ or 4′-5′-seco nucleotide monomer). Exemplary acyclic nucleotides are disclosed in U.S. Pat. No. 8,314,227, incorporated herein by reference in its entirely. For example, an acyclic nucleotide can include any of monomers D-J in FIGS. 1-2 of U.S. Pat. No. 8,314,227. In one embodiment, the acyclic nucleotide includes the following monomer:

[chemical structure]

[0400] wherein Base is a nucleobase, e.g., a naturally-occurring or a modified nucleobase (e.g., a nucleobase as described herein).

[0401] In certain embodiments, the acyclic nucleotide can be modified or derivatized, e.g., by coupling the acyclic nucleotide to another moiety, e.g., a ligand (e.g., a GalNAc, a cholesterol ligand), an alkyl, a polyamine, a sugar, a polypeptide, among others.

[0402] In other embodiments, the iRNA agent includes one or more acyclic nucleotides and one or more LNAs (e.g., an LNA as described herein). For example, one or more acyclic nucleotides and/or one or more LNAs can be present in the sense strand, the antisense strand, or both. The number of acyclic nucleotides in one strand can be the same or different from the number of LNAs in the opposing strand. In certain embodiments, the sense strand and/or the antisense strand comprises less than five LNAs (e.g., four, three, two or one LNAs) located in the double-stranded region or a 3′-overhang. In other embodiments, one or two LNAs are located in the double stranded region or the 3′-overhang of the sense strand. Alternatively, or in combination, the sense strand and/or antisense strand comprises less than five acyclic nucleotides (e.g., four, three, two or one acyclic nucleotides) in the double-stranded region or a 3′-overhang. In one embodiment, the sense strand of the iRNA agent comprises one or two LNAs in the 3′-overhang of the sense strand, and one or two acyclic nucleotides in the double-standed region of the antisense strand (e.g., at positions 4 to 10 (e.g., positions 6-8) from the 5′-end of the antisense strand) of the iRNA agent.

[0403] In other embodiments, inclusion of one or more acyclic nucleotides (alone or in addition to one or more LNAs) in the iRNA agent results in one or more (or all) of: (i) a reduction in an off-target effect; (ii) a reduction in passenger strand participation in RNAi; (iii) an increase in specificity of the guide strand for its target mRNA; (iv) a reduction in a microRNA off-target effect; (v) an increase in stability; or (vi) an increase in resistance to degradation, of the iRNA molecule.

[0404] Other modifications include 2′-methoxy (2′-OCH₃), 2′-aminopropoxy (2′-OCH₂CH₂CH₂NH₂) and 2′-fluoro (2′-F) Similar modifications may also be made at other positions on the RNA of an iRNA, particularly the 3′ position of the sugar on the 3′ terminal nucleotide or in 2′-5′ linked dsRNAs and the 5′ position of 5′ terminal nucleotide. iRNAs may also have sugar mimetics such as cyclobutyl moieties in place of the pentofuranosyl sugar. Representative U.S. patents that teach the preparation of such modified sugar structures include, but are not limited to, U.S. Pat. Nos. 4,981,957; 5,118,800; 5,319,080; 5,359,044; 5,393,878; 5,446,137; 5,466,786; 5,514,785; 5,519,134; 5,567,811; 5,576,427; 5,591,722; 5,597,909; 5,610,300; 5,627,053; 5,639,873; 5,646,265; 5,658,873; 5,670,633; and 5,700,920, certain of which are commonly owned with the instant application, and each of which is herein incorporated by reference.

[0405] An iRNA may also include nucleobase (often referred to in the art simply as “base”) modifications or substitutions. As used herein, “unmodified” or “natural” nucleobases include the purine bases adenine (A) and guanine (G), and the pyrimidine bases thymine (T), cytosine (C) and uracil (U). Modified nucleobases include other synthetic and natural nucleobases such as 5-methylcytosine (5-me-C), 5-hydroxymethyl cytosine, xanthine, hypoxanthine, 2-aminoadenine, 6-methyl and other alkyl derivatives of adenine and guanine, 2-propyl and other alkyl derivatives of adenine and guanine, 2-thiouracil, 2-thiothymine and 2-thiocytosine, 5-halouracil and cytosine, 5-propynyl uracil and cytosine, 6-azo uracil, cytosine and thymine, 5-uracil (pseudouracil), 4-thiouracil, 8-halo, 8-amino, 8-thiol, 8-thioalkyl, 8-hydroxyl anal other 8-substituted adenines and guanines, 5-halo, particularly 5-bromo, 5-trifluoromethyl and other 5-substituted uracils and cytosines, 7-methylguanine and 7-methyladenine, 8-azaguanine and 8-azaadenine, 7-deazaguanine and 7-daazaadenine and 3-deazaguanine and 3-deazaadenine. Further nucleobases include those disclosed in U.S. Pat. No. 3,687,808, those disclosed in Modified Nucleosides in Biochemistry, Biotechnology and Medicine, Herdewijn, P. ed. Wiley-VCH, 2008; those disclosed in The Concise Encyclopedia Of Polymer Science And Engineering, pages 858-859, Kroschwitz, J. L, ed. John Wiley & Sons, 1990, these disclosed by Englisch et al., Angewandte Chemie, International Edition, 1991, 30, 613, and those disclosed by Sanghvi, Y S., Chapter 15, dsRNA Research and Applications, pages 289-302, Crooke, S. T. and Lebleu, B., Ed., CRC Press, 1993. Certain of these nucleobases are particularly useful for increasing the binding affinity of the oligomeric compounds featured in the invention. These include 5-substituted pyrimidines, 6-azapyrimidines and N-2, N-6 and 0-6 substituted purines, including 2-aminopropyladenine, 5-propynyluracil and 5-propynylcytosine. 5-methylcytosine substitutions have been shown to increase nucleic acid duplex stability by 0.6-1.2° C. (Sanghvi, Y. S., Crooke, S. T. and Lebleu, B., Eds., dsRNA Research and Applications, CRC Press, Boca Raton, 1993, pp. 276-278) and are exemplary base substitutions, even more particularly when combined with 2′-O-methoxyethyl sugar modifications.

[0406] Representative U.S. patents that teach the preparation of certain of the above noted modified nucleobases as well as other modified nucleobases include, but are not limited to, the above noted U.S. Pat. No. 3,687,808, as well as U.S. Pat. Nos. 4,845,205; 5,130,30; 5,134,066; 5,175,273; 5,367,066; 5,432,272; 5,457,187; 5,459,255; 5,484,908; 5,502,177; 5,525,711; 5,552,540; 5,587,469; 5,594,121, 5,596,091; 5,614,617; 5,681,941; 6,015,886; 6,147,200; 6,166,197; 6,222,025; 6,235,887; 6,380,368; 6,528,640; 6,639,062; 6,617,438; 7,045,610; 7,427,672; and 7,495,088, each of which is herein incorporated by reference, and U.S. Pat. No. 5,750,692, also herein incorporated by reference.

[0407] The RNA of an iRNA can also be modified to include one or more (e.g., about 1, 2, 3, 4, 5, 6, 7, 8, 9, 10, or more) locked nucleic acids (LNA), (also referred to herein as “locked nucleotides”). In one embodiment, a locked nucleic acid is a nucleotide having a modified ribose moiety in which the ribose moiety comprises an extra bridge connecting, e.g., the 2′ and 4′ carbons. This structure effectively “locks” the ribose in the 3′-endo structural conformation. The addition of locked nucleic acids to siRNAs has been shown to increase siRNA stability in serum, increase thermal stability, and to reduce off-target effects (Elmen, J. et al., (2005) Nucleic Acids Research 33(1):439-447; Mook, O R. et al., (2007) Mol Canc Ther 6(3):833-843; Grunweller, A. et al., (2003) Nucleic Acids Research 31(12):3185-3193).

[0408] Representative U.S. patents that teach the preparation of locked nucleic acid nucleotides include, but are not limited to, the following: U.S. Pat. Nos. 6,268,490; 6,670,461; 6,794,499; 6,998,484; 7,053,207; 7,084,125; 7,399,845; and 8,314,227, each of which is herein incorporated by reference in its entirety. Exemplary LNAs include but are not limited to, a 2′, 4′-C methylene bicyclo nucleotide (see for example Wengel et al., International PCT Publication No. WO 00/66604 and WO 99/14226).

[0409] In other embodiments, the iRNA agents include one or more (e.g., about 1, 2, 3, 4, 5, 6, 7, 8, 9, 10, or more) G-clamp nucleotides. A G-clamp nucleotide is a modified cytosine analog wherein the modifications confer the ability to hydrogen bond both Watson-Crick and Hoogsteen faces of a complementary guanine within a duplex, see for example Lin and Matteucci, 1998, J. Am. Chem. Soc., 120, 8531-8532. A single G-clamp analog substitution within an oligonucleotide can result in substantially enhanced helical thermal stability and mismatch discrimination when hybridized to complementary oligonucleotides. The inclusion of such nucleotides in the iRNA molecules can result in enhanced affinity and specificity to nucleic acid targets, complementary sequences, or template strands.

[0410] Potentially stabilizing modifications to the ends of RNA molecules can include N-(acetylaminocaproyl)-4-hydroxyprolinol (Hyp-C6-NHAc), N-(caproyl-4-hydroxyprolinol (Hyp-C6), N-(acetyl-4-hydroxyprolinol (Hyp-NHAc), thymidine-2′-O-deoxythymidine (ether), N-(aminocaproyl)-4-hydroxyprolinol (Hyp-C6-amino), 2-docosanoyl-uridine-3″-phosphate, inverted base dT(idT) and others. Disclosure of this modification can be found in PCT Publication No. WO 2011/005861.

iRNA Motifs

[0411] In one embodiment, the sense strand sequence may be represented by formula (I):

5′nₚ-Nₐ—(X X X)ᵢ—N_{b}—Y Y Y—N_{b}—(Z Z Z)ⱼ—Nₐ-n_{q}3′ (I)

[0412] wherein:

[0413] i and j are each independently 0 or 1;

[0414] p and q are each independently 0-6;

[0415] each Nₐ independently represents an oligonucleotide sequence comprising 0-25 modified nucleotides, each sequence comprising at least two differently modified nucleotides;

[0416] each N_{b} independently represents an oligonucleotide sequence comprising 0-10 modified nucleotides;

[0417] each nₚ and n_{q} independently represent an overhang nucleotide;

[0418] wherein Nb and Y do not have the same modification; and

[0419] XXX, YYY and ZZZ each independently represent one motif of three identical modifications on three consecutive nucleotides. Preferably YYY is all 2′-F modified nucleotides.

[0420] In one embodiment, the Nₐ and/or N_{b} comprise modifications of alternating pattern.

[0421] In one embodiment, the YYY motif occurs at or near the cleavage site of the sense strand. For example, when the RNAi agent has a duplex region of 17-23 nucleotides in length, the YYY motif can occur at or the vicinity of the cleavage site (e.g.: can occur at positions 6, 7, 8; 7, 8, 9; 8, 9, 10; 9, 10, 11; 10, 11, 12 or 11, 12, 13) of—the sense strand, the count starting from the 1^{st} nucleotide, from the 5′-end; or optionally, the count starting at the 1^{st} paired nucleotide within the duplex region, from the 5′-end.

[0422] In one embodiment, i is 1 and j is 0, or i is 0 and j is 1, or both i and j are 1. The sense strand can therefore be represented by the following formulas:

5′nₚ-Nₐ—YYY—N_{b}—ZZZ—Nₐ-n_{q}3′ (Ib);

5′nₚ-Nₐ—XXX—N_{b}—YYY—Nₐ-n_{q}3′ (Ic); or

5′nₚ-Nₐ—XXX—N_{b}—YYY—N_{b}—ZZZ—Nₐ-n_{q}3′ (Id).

[0423] When the sense strand is represented by formula (Ib), N_{b} represents an oligonucleotide sequence comprising 0-10, 0-7, 0-5, 0-4, 0-2 or 0 modified nucleotides. Each Nₐ independently can represent an oligonucleotide sequence comprising 2-20, 2-15, or 2-10 modified nucleotides.

[0424] When the sense strand is represented as formula (Ic), N_{b} represents an oligonucleotide sequence comprising 0-10, 0-7, 0-5, 0-4, 0-2 or 0 modified nucleotides. Each Nₐ can independently represent an oligonucleotide sequence comprising 2-20, 2-15, or 2-10 modified nucleotides.

[0425] When the sense strand is represented as formula (Id), each N_{b} independently represents an oligonucleotide sequence comprising 0-10, 0-7, 0-5, 0-4, 0-2 or 0 modified nucleotides. Preferably, N_{b} is 0, 1, 2, 3, 4, 5 or 6. Each Nₐ can independently represent an oligonucleotide sequence comprising 2-20, 2-15, or 2-10 modified nucleotides.

[0426] Each of X, Y and Z may be the same or different from each other.

[0427] In other embodiments, i is 0 and j is 0, and the sense strand may be represented by the formula:

5′nₚ-Nₐ—YYY—Nₐ-n_{q}3′ (Ia).

[0428] When the sense strand is represented by formula (Ia), each Nₐ independently can represent an oligonucleotide sequence comprising 2-20, 2-15, or 2-10 modified nucleotides.

[0429] In one embodiment, the antisense strand sequence of the RNAi may be represented by formula (II):

5′n_{q′}-Nₐ′—(Z′Z′Z′)ₖ—N_{b}′—Y′Y′Y′—N_{b}′—(X′X′X′)ₗ—N′ₐ-nₚ′3′ (II)

[0430] wherein:

[0431] k and 1 are each independently 0 or 1;

[0432] p′ and q′ are each independently 0-6;

[0433] each Nₐ′ independently represents an oligonucleotide sequence comprising 0-25 modified nucleotides, each sequence comprising at least two differently modified nucleotides;

[0434] each N_{b}′ independently represents an oligonucleotide sequence comprising 0-10 modified nucleotides;

[0435] each nₚ′ and n_{q}′ independently represent an overhang nucleotide;

[0436] wherein N_{b}′ and Y′ do not have the same modification;

[0437] and

[0438] X′X′X′, Y′Y′Y′ and Z′Z′Z′ each independently represent one motif of three identical modifications on three consecutive nucleotides.

[0439] In one embodiment, the Nₐ′ and/or N_{b}′ comprise modifications of alternating pattern.

[0440] The Y′Y′Y′ motif occurs at or near the cleavage site of the antisense strand. For example, when the RNAi agent has a duplex region of 17-23 nucleotide in length, the Y′Y′Y′ motif can occur at positions 9, 10, 11; 10, 11, 12; 11, 12, 13; 12, 13, 14; or 13, 14, 15 of the antisense strand, with the count starting from the 1^{st} nucleotide, from the 5′-end; or optionally, the count starting at the 1^{st} paired nucleotide within the duplex region, from the 5′-end. Preferably, the Y′Y′Y′ motif occurs at positions 11, 12, 13.

[0441] In one embodiment, Y′Y′Y′ motif is all 2′-OMe modified nucleotides.

[0442] In one embodiment, k is 1 and l is 0, or k is 0 and l is 1, or both k and l are 1.

[0443] The antisense strand can therefore be represented by the following formulas:

5′n_{q′}-Nₐ′—Z′Z′Z′—N_{b}′—Y′Y′Y′—Nₐ′-n_{p′}3′ (IIb);

5′n_{q′}-Nₐ′—Y′Y′Y′—N_{b}′—X′X′X′-n_{p′}3′ (IIc); or

5′n_{q′}-Nₐ′—Z′Z′Z′—N_{b}′—Y′Y′Y′—N_{b}′—X′X′X′—Nₐ′-n_{p′}3′ (IId).

[0444] When the antisense strand is represented by formula (IIb), N_{b}′ represents an oligonucleotide sequence comprising 0-10, 0-7, 0-5, 0-4, 0-2 or 0 modified nucleotides. Each Nₐ′ independently represents an oligonucleotide sequence comprising 2-20, 2-15, or 2-10 modified nucleotides.

[0445] When the antisense strand is represented as formula (IIc), N_{b}′ represents an oligonucleotide sequence comprising 0-10, 0-7, 0-5, 0-4, 0-2 or 0 modified nucleotides. Each Nₐ′ independently represents an oligonucleotide sequence comprising 2-20, 2-15, or 2-10 modified nucleotides.

[0446] When the antisense strand is represented as formula (IId), each N_{b}′ independently represents an oligonucleotide sequence comprising 0-10, 0-7, 0-5, 0-4, 0-2 or 0 modified nucleotides. Each Nₐ′ independently represents an oligonucleotide sequence comprising 2-20, 2-15, or 2-10 modified nucleotides. Preferably, N_{b} is 0, 1, 2, 3, 4, 5 or 6.

[0447] In other embodiments, k is 0 and l is 0 and the antisense strand may be represented by the formula:

5′n_{p′}-Nₐ′—Y′Y′Y′—Nₐ′-n_{p′}3′ (Ia).

[0448] When the antisense strand is represented as formula (IIa), each Nₐ′ independently represents an oligonucleotide sequence comprising 2-20, 2-15, or 2-10 modified nucleotides.

[0449] Each of X′, Y′ and Z′ may be the same or different from each other.

[0450] Each nucleotide of the sense strand and antisense strand may be independently modified with LNA, HNA, CeNA, 2′-methoxyethyl, 2′-O-methyl, 2′-O-allyl, 2′-C-allyl, 2′-hydroxyl, or 2′-fluoro. For example, each nucleotide of the sense strand and antisense strand is independently modified with 2′-O-methyl or 2′-fluoro. Each X, Y, Z, X′, Y′ and Z′, in particular, may represent a 2′-O-methyl modification or a 2′-fluoro modification.

[0451] In one embodiment, the sense strand of the RNAi agent may contain YYY motif occurring at 9, 10 and 11 positions of the strand when the duplex region is 21 nt, the count starting from the 1^{St} nucleotide from the 5′-end, or optionally, the count starting at the 1^{St} paired nucleotide within the duplex region, from the 5′-end; and Y represents 2′-F modification. The sense strand may additionally contain XXX motif or ZZZ motifs as wing modifications at the opposite end of the duplex region; and XXX and ZZZ each independently represents a 2′-OMe modification or 2′-F modification.

[0452] In one embodiment the antisense strand may contain Y′Y′Y′ motif occurring at positions 11, 12, 13 of the strand, the count starting from the 1^{st} nucleotide from the 5′-end, or optionally, the count starting at the 1^{st} paired nucleotide within the duplex region, from the 5′-end; and Y′ represents 2′-O-methyl modification. The antisense strand may additionally contain X′X′X′ motif or Z′Z′Z′ motifs as wing modifications at the opposite end of the duplex region; and X′X′X′ and Z′Z′Z′ each independently represents a 2′-OMe modification or 2′-F modification.

[0453] The sense strand represented by any one of the above formulas (Ia), (Ib), (Ic), and (Id) forms a duplex with a antisense strand being represented by any one of formulas (IIa), (IIb), (IIc), and (IId), respectively.

[0454] Accordingly, the RNAi agents for use in the methods of the invention may comprise a sense strand and an antisense strand, each strand having 14 to 30 nucleotides, the RNAi duplex represented by formula (III):

sense: 5′nₚ-Nₐ—(X X X)ᵢ—N_{b}—Y Y Y—N_{b}—(Z Z Z)ⱼ—Nₐ-n_{q}3′

antisense: 3′nₚ′-Nₐ′—(X′X′X′)ₖ—N_{b}′—Y′Y′Y′—N_{b}′—(Z′Z′Z′)ₗ—Nₐ′-n_{q}5′ (III)

[0455] wherein:

[0456] i, j, k, and 1 are each independently 0 or 1;

[0457] p, p′, q, and q′ are each independently 0-6;

[0458] each Nₐ and Nₐ′ independently represents an oligonucleotide sequence comprising 0-25 modified nucleotides, each sequence comprising at least two differently modified nucleotides;

[0459] each N_{b} and N_{b}′ independently represents an oligonucleotide sequence comprising 0-10 modified nucleotides;

[0460] wherein

[0461] each nₚ′, nₚ, n_{q}′, and n_{q}, each of which may or may not be present, independently represents an overhang nucleotide; and

[0462] XXX, YYY, ZZZ, X′X′X′, Y′Y′Y′, and Z′Z′Z′ each independently represent one motif of three identical modifications on three consecutive nucleotides.

[0463] In one embodiment, i is 0 and j is 0; or i is 1 and j is 0; or i is 0 and j is 1; or both i and j are 0; or both i and j are 1. In another embodiment, k is 0 and l is 0; or k is 1 and l is 0; k is 0 and l is 1; or both k and l are 0; or both k and l are 1.

[0464] Exemplary combinations of the sense strand and antisense strand forming a RNAi duplex include the formulas below:

5′nₚ-Nₐ—Y Y Y—Nₐ-n_{q}3′

3′nₚ′-Nₐ′—Y′Y′Y′—Nₐ′n_{q}′5′ (IIIa)

5′nₚ-Nₐ—Y Y Y—N_{b}—Z Z Z—Nₐ-n_{q}3′

3′n_{p′}-Nₐ′—Y′Y′Y′—N_{b}′—Z′Z′Z′—Nₐ′n_{q}′5′ (IIIb)

5′nₚ-Nₐ—X X X—N_{b}—Y Y Y—Nₐ-n_{q}3′

3′nₚ′-Nₐ′—X′X′X′—N_{b}′—Y′Y′Y′—Nₐ′-n_{q}′5′ (IIIc)

5′nₚ-Nₐ—X X X—N_{b}—Y Y Y—N_{b}—Z Z Z—Nₐ-n_{q}3′

3′nₚ′-Nₐ′—X′X′X′—N_{b}′—Y′Y′Y′—N_{b}′—Z′Z′Z′—Nₐ-n_{q}′5′ (IIId)

[0465] When the RNAi agent is represented by formula (IIIa), each Nₐ independently represents an oligonucleotide sequence comprising 2-20, 2-15, or 2-10 modified nucleotides.

[0466] When the RNAi agent is represented by formula (IIIb), each N_{b} independently represents an oligonucleotide sequence comprising 1-10, 1-7, 1-5 or 1-4 modified nucleotides. Each Nₐ independently represents an oligonucleotide sequence comprising 2-20, 2-15, or 2-10 modified nucleotides.

[0467] When the RNAi agent is represented as formula (IIIc), each N_{b}, N_{b}′ independently represents an oligonucleotide sequence comprising 0-10, 0-7, 0-5, 0-4, 0-2 or 0 modified nucleotides. Each Nₐ independently represents an oligonucleotide sequence comprising 2-20, 2-15, or 2-10 modified nucleotides.

[0468] When the RNAi agent is represented as formula (IIId), each N_{b}, N_{b}′ independently represents an oligonucleotide sequence comprising 0-10, 0-7, 0-5, 0-4, 0-2 or 0 modified nucleotides. Each Nₐ, Nₐ′ independently represents an oligonucleotide sequence comprising 2-20, 2-15, or 2-10 modified nucleotides. Each of Nₐ, Nₐ′, N_{b} and N_{b}′ independently comprises modifications of alternating pattern.

[0469] Each of X, Y and Z in formulas (III), (IIIa), (IIIb), (IIIc), and (IIId) may be the same or different from each other.

[0470] When the RNAi agent is represented by formula (III), (IIIa), (IIIb), (IIIc), and (IIId), at least one of the Y nucleotides may form a base pair with one of the Y′ nucleotides. Alternatively, at least two of the Y nucleotides form base pairs with the corresponding Y′ nucleotides; or all three of the Y nucleotides all form base pairs with the corresponding Y′ nucleotides.

[0471] When the RNAi agent is represented by formula (IIIb) or (IIId), at least one of the Z nucleotides may form a base pair with one of the Z′ nucleotides. Alternatively, at least two of the Z nucleotides form base pairs with the corresponding Z′ nucleotides; or all three of the Z nucleotides all form base pairs with the corresponding Z′ nucleotides.

[0472] When the RNAi agent is represented as formula (IIIc) or (IIId), at least one of the X nucleotides may form a base pair with one of the X′ nucleotides. Alternatively, at least two of the X nucleotides form base pairs with the corresponding X′ nucleotides; or all three of the X nucleotides all form base pairs with the corresponding X′ nucleotides.

[0473] In one embodiment, the modification on the Y nucleotide is different than the modification on the Y′ nucleotide, the modification on the Z nucleotide is different than the modification on the Z′ nucleotide, and/or the modification on the X nucleotide is different than the modification on the X′ nucleotide.

[0474] In one embodiment, when the RNAi agent is represented by formula (IIId), the Nₐ modifications are 2′-O-methyl or 2′-fluoro modifications. In another embodiment, when the RNAi agent is represented by formula (IIId), the Nₐ modifications are 2′-O-methyl or 2′-fluoro modifications and nₚ′>0 and at least one nₚ′ is linked to a neighboring nucleotide a via phosphorothioate linkage. In yet another embodiment, when the RNAi agent is represented by formula (IIId), the Nₐ modifications are 2′-O-methyl or 2′-fluoro modifications, nₚ′>0 and at least one nₚ′ is linked to a neighboring nucleotide via phosphorothioate linkage, and the sense strand is conjugated to one or more GalNAc derivatives attached through a bivalent or trivalent branched linker. In another embodiment, when the RNAi agent is represented by formula (IIId), the Nₐ modifications are 2′-O-methyl or 2′-fluoro modifications, nₚ′>0 and at least one nₚ′ is linked to a neighboring nucleotide via phosphorothioate linkage, the sense strand comprises at least one phosphorothioate linkage, and the sense strand is conjugated to one or more GalNAc derivatives attached through a bivalent or trivalent branched linker.

[0475] In one embodiment, when the RNAi agent is represented by formula (IIIa), the Nₐ modifications are 2′-O-methyl or 2′-fluoro modifications, nₚ′>0 and at least one nₚ′ is linked to a neighboring nucleotide via phosphorothioate linkage, the sense strand comprises at least one phosphorothioate linkage, and the sense strand is conjugated to one or more GalNAc derivatives attached through a bivalent or trivalent branched linker.

[0476] In one embodiment, the RNAi agent is a multimer containing at least two duplexes represented by formula (III), (IIIa), (IIIb), (IIIc), and (IIId), wherein the duplexes are connected by a linker. The linker can be cleavable or non-cleavable. Optionally, the multimer further comprises a ligand. Each of the duplexes can target the same gene or two different genes; or each of the duplexes can target same gene at two different target sites.

[0477] In one embodiment, the RNAi agent is a multimer containing three, four, five, six or more duplexes represented by formula (III), (IIIa), (IIIb), (IIIc), and (IIId), wherein the duplexes are connected by a linker. The linker can be cleavable or non-cleavable. Optionally, the multimer further comprises a ligand. Each of the duplexes can target the same gene or two different genes; or each of the duplexes can target same gene at two different target sites.

[0478] In one embodiment, two RNAi agents represented by formula (III), (IIIa), (IIIb), (IIIc), and (IIId) are linked to each other at the 5′ end, and one or both of the 3′ ends and are optionally conjugated to to a ligand. Each of the agents can target the same gene or two different genes; or each of the agents can target same gene at two different target sites.

iRNA Conjugates

[0479] The iRNA agents disclosed herein can be in the form of conjugates. The conjugate may be attached at any suitable location in the iRNA molecule, e.g., at the 3′ end or the 5′ end of the sense or the antisense strand. The conjugates are optionally attached via a linker.

[0480] In some embodiments, an iRNA agent described herein is chemically linked to one or more ligands, moieties or conjugates, which may confer functionality, e.g., by affecting (e.g., enhancing) the activity, cellular distribution or cellular uptake of the iRNA. Such moieties include but are not limited to lipid moieties such as a cholesterol moiety (Letsinger et al., Proc. Natl. Acid. Sci. USA, 1989, 86: 6553-6556), cholic acid (Manoharan et al., Biorg. Med. Chem. Let., 1994, 4:1053-1060), a thioether, e.g., beryl-S-tritylthiol (Manoharan et al., Ann. N.Y. Acad. Sci., 1992, 660:306-309; Manoharan et al., Biorg. Med. Chem. Let., 1993, 3:2765-2770), a thiocholesterol (Oberhauser et al., Nucl. Acids Res., 1992, 20:533-538), an aliphatic chain, e.g., dodecandiol or undecyl residues (Saison-Behmoaras et al., EMBO J, 1991, 10:1111-1118; Kabanov et al., FEBS Lett., 1990, 259:327-330; Svinarchuk et al., Biochimie, 1993, 75:49-54), a phospholipid, e.g., di-hexadecyl-rac-glycerol or triethyl-ammonium 1,2-di-O-hexadecyl-rac-glycero-3-phosphonate (Manoharan et al., Tetrahedron Lett., 1995, 36:3651-3654; Shea et al., Nucl. Acids Res., 1990, 18:3777-3783), a polyamine or a polyethylene glycol chain (Manoharan et al., Nucleosides & Nucleotides, 1995, 14:969-973), or adamantane acetic acid (Manoharan et al., Tetrahedron Lett., 1995, 36:3651-3654), a palmityl moiety (Mishra et al., Biochim. Biophys. Acta, 1995, 1264:229-237), or an octadecylamine or hexylamino-carbonyloxycholesterol moiety (Crooke et al., J. Pharmacol. Exp. Ther., 1996, 277:923-937).

[0481] In one embodiment, a ligand alters the distribution, targeting or lifetime of an iRNA agent into which it is incorporated. In some embodiments, a ligand provides an enhanced affinity for a selected target, e.g, molecule, cell or cell type, compartment, e.g., a cellular or organ compartment, tissue, organ or region of the body, as, e.g., compared to a species absent such a ligand. Typical ligands will not take part in duplex pairing in a duplexed nucleic acid.

[0482] Ligands can include a naturally occurring substance, such as a protein (e.g., human serum albumin (HSA), low-density lipoprotein (LDL), or globulin); carbohydrate (e.g., a dextran, pullulan, chitin, chitosan, inulin, cyclodextrin or hyaluronic acid); or a lipid. The ligand may also be a recombinant or synthetic molecule, such as a synthetic polymer, e.g., a synthetic polyamino acid. Examples of polyamino acids include polyamino acid is a polylysine (PLL), poly L-aspartic acid, poly L-glutamic acid, styrene-maleic acid anhydride copolymer, poly(L-lactide-co-glycolied) copolymer, divinyl ether-maleic anhydride copolymer, N-(2-hydroxypropyl)methacrylamide copolymer (HMPA), polyethylene glycol (PEG), polyvinyl alcohol (PVA), polyurethane, poly(2-ethylacryllic acid), N-isopropylacrylamide polymers, or polyphosphazine. Example of polyamines include: polyethylenimine, polylysine (PLL), spermine, spermidine, polyamine, pseudopeptide-polyamine, peptidomimetic polyamine, dendrimer polyamine, arginine, amidine, protamine, cationic lipid, cationic porphyrin, quaternary salt of a polyamine, or an α helical peptide.

[0483] Ligands can also include targeting groups, e.g., a cell or tissue targeting agent, e.g., a lectin, glycoprotein, lipid or protein, e.g., an antibody, that binds to a specified cell type such as a kidney cell. A targeting group can be a thyrotropin, melanotropin, lectin, glycoprotein, surfactant protein A, Mucin carbohydrate, multivalent lactose, multivalent galactose, N-acetyl-galactosamine, N-acetyl-gulucosamine multivalent mannose, multivalent fucose, glycosylated polyaminoacids, multivalent galactose, transferrin, bisphosphonate, polyglutamate, polyaspartate, a lipid, cholesterol, a steroid, bile acid, folate, vitamin B12, biotin, or an RGD peptide or RGD peptide mimetic.

[0484] In some embodiments, the ligand is a GalNAc ligand that comprises one or more N-acetylgalactosamine (GalNAc) derivatives. Additional description of GalNAc ligands is provided in the section titled Carbohydrate Conjugates.

[0485] Other examples of ligands include dyes, intercalating agents (e.g. acridines), cross-linkers (e.g. psoralene, mitomycin C), porphyrins (TPPC4, texaphyrin, Sapphyrin), polycyclic aromatic hydrocarbons (e.g., phenazine, dihydrophenazine), artificial endonucleases (e.g. EDTA), lipophilic molecules, e.g, cholesterol, cholic acid, adamantane acetic acid, 1-pyrene butyric acid, dihydrotestosterone, 1,3-Bis-O(hexadecyl)glycerol, geranyloxyhexyl group, hexadecylglycerol, borneol, menthol, 1,3-propanediol, heptadecyl group, palmitic acid, myristic acid, O3-(oleoyl)lithocholic acid, O3-(oleoyl)cholenic acid, dimethoxytrityl, or phenoxazine) and peptide conjugates (e.g., antennapedia peptide, Tat peptide), alkylating agents, phosphate, amino, mercapto, PEG (e.g., PEG-40K), MPEG, [MPEG]₂, polyamino, alkyl, substituted alkyl, radiolabeled markers, enzymes, haptens (e.g. biotin), transport/absorption facilitators (e.g., aspirin, vitamin E, folic acid), synthetic ribonucleases (e.g., imidazole, bisimidazole, histamine, imidazole clusters, acridine-imidazole conjugates, Eu3+ complexes of tetraazamacrocycles), dinitrophenyl, HRP, or AP.

[0486] Ligands can be proteins, e.g., glycoproteins, or peptides, e.g., molecules having a specific affinity for a co-ligand, or antibodies e.g., an antibody, that binds to a specified cell type such as a cancer cell, endothelial cell, or bone cell. Ligands may also include hormones and hormone receptors. They can also include non-peptidic species, such as lipids, lectins, carbohydrates, vitamins, cofactors, multivalent lactose, multivalent galactose, N-acetyl-galactosamine, N-acetyl-gulucosamine multivalent mannose, or multivalent fucose. The ligand can be, for example, a lipopolysaccharide, an activator of p38 MAP kinase, or an activator of NF-κB.

[0487] The ligand can be a substance, e.g, a drug, which can increase the uptake of the iRNA agent into the cell, for example, by disrupting the cell's cytoskeleton, e.g., by disrupting the cell's microtubules, microfilaments, and/or intermediate filaments. The drug can be, for example, taxon, vincristine, vinblastine, cytochalasin, nocodazole, japlakinolide, latrunculin A, phalloidin, swinholide A, indanocine, or myoservin.

[0488] In some embodiments, a ligand attached to an iRNA as described herein acts as a pharmacokinetic modulator (PK modulator). PK modulators include lipophiles, bile acids, steroids, phospholipid analogues, peptides, protein binding agents, PEG, vitamins etc. Exemplary PK modulators include, but are not limited to, cholesterol, fatty acids, cholic acid, lithocholic acid, dialkylglycerides, diacylglyceride, phospholipids, sphingolipids, naproxen, ibuprofen, vitamin E, biotin etc. Oligonucleotides that comprise a number of phosphorothioate linkages are also known to bind to serum protein, thus short oligonucleotides, e.g., oligonucleotides of about 5 bases, 10 bases, 15 bases or 20 bases, comprising multiple of phosphorothioate linkages in the backbone are also amenable to the present invention as ligands (e.g. as PK modulating ligands). In addition, aptamers that bind serum components (e.g. serum proteins) are also suitable for use as PK modulating ligands in the embodiments described herein.

[0489] Ligand-conjugated oligonucleotides of the invention may be synthesized by the use of an oligonucleotide that bears a pendant reactive functionality, such as that derived from the attachment of a linking molecule onto the oligonucleotide (described below). This reactive oligonucleotide may be reacted directly with commercially-available ligands, ligands that are synthesized bearing any of a variety of protecting groups, or ligands that have a linking moiety attached thereto.

[0490] The oligonucleotides used in the conjugates of the present invention may be conveniently and routinely made through the well-known technique of solid-phase synthesis. Equipment for such synthesis is sold by several vendors including, for example, Applied Biosystems (Foster City, Calif.). Any other means for such synthesis known in the art may additionally or alternatively be employed. It is also known to use similar techniques to prepare other oligonucleotides, such as the phosphorothioates and alkylated derivatives.

[0491] In the ligand-conjugated oligonucleotides and ligand-molecule bearing sequence-specific linked nucleosides of the present invention, the oligonucleotides and oligonucleosides may be assembled on a suitable DNA synthesizer utilizing standard nucleotide or nucleoside precursors, or nucleotide or nucleoside conjugate precursors that already bear the linking moiety, ligand-nucleotide or nucleoside-conjugate precursors that already bear the ligand molecule, or non-nucleoside ligand-bearing building blocks.

[0492] When using nucleotide-conjugate precursors that already bear a linking moiety, the synthesis of the sequence-specific linked nucleosides is typically completed, and the ligand molecule is then reacted with the linking moiety to form the ligand-conjugated oligonucleotide. In some embodiments, the oligonucleotides or linked nucleosides of the present invention are synthesized by an automated synthesizer using phosphoramidites derived from ligand-nucleoside conjugates in addition to the standard phosphoramidites and non-standard phosphoramidites that are commercially available and routinely used in oligonucleotide synthesis.

[0493] Lipid Conjugates

[0494] In one embodiment, the ligand is a lipid or lipid-based molecule. Such a lipid or lipid-based molecule can typically bind a serum protein, such as human serum albumin (HSA). An HSA binding ligand allows for distribution of the conjugate to a target tissue, e.g., a non-kidney target tissue of the body. For example, the target tissue can be the liver, including parenchymal cells of the liver. Other molecules that can bind HSA can also be used as ligands. For example, neproxin or aspirin can be used. A lipid or lipid-based ligand can (a) increase resistance to degradation of the conjugate, (b) increase targeting or transport into a target cell or cell membrane, and/or (c) can be used to adjust binding to a serum protein, e.g., HSA.

[0495] A lipid based ligand can be used to modulate, e.g., control (e.g., inhibit) the binding of the conjugate to a target tissue. For example, a lipid or lipid-based ligand that binds to HSA more strongly will be less likely to be targeted to the kidney and therefore less likely to be cleared from the body. A lipid or lipid-based ligand that binds to HSA less strongly can be used to target the conjugate to the kidney.

[0496] In one embodiment, the lipid based ligand binds HSA. For example, the ligand can bind HSA with a sufficient affinity such that distribution of the conjugate to a non-kidney tissue is enhanced. However, the affinity is typically not so strong that the HSA-ligand binding cannot be reversed.

[0497] In another embodiment, the lipid based ligand binds HSA weakly or not at all, such that distribution of the conjugate to the kidney is enhanced. Other moieties that target to kidney cells can also be used in place of or in addition to the lipid based ligand.

[0498] In another aspect, the ligand is a moiety, e.g., a vitamin, which is taken up by a target cell, e.g., a proliferating cell. These are particularly useful for treating disorders characterized by unwanted cell proliferation, e.g., of the malignant or non-malignant type, e.g., cancer cells. Exemplary vitamins include vitamin A, E, and K. Other exemplary vitamins include are B vitamin, e.g., folic acid, B12, riboflavin, biotin, pyridoxal or other vitamins or nutrients taken up by cancer cells. Also included are HSA and low density lipoprotein (LDL).

[0499] Cell Permeation Agents

[0500] In another aspect, the ligand is a cell-permeation agent, such as a helical cell-permeation agent. In one embodiment, the agent is amphipathic. An exemplary agent is a peptide such as tat or antennopedia. If the agent is a peptide, it can be modified, including a peptidylmimetic, invertomers, non-peptide or pseudo-peptide linkages, and use of D-amino acids. The helical agent is typically an α-helical agent, and can have a lipophilic and a lipophobic phase.

[0501] The ligand can be a peptide or peptidomimetic. A peptidomimetic (also referred to herein as an oligopeptidomimetic) is a molecule capable of folding into a defined three-dimensional structure similar to a natural peptide. The attachment of peptide and peptidomimetics to iRNA agents can affect pharmacokinetic distribution of the iRNA, such as by enhancing cellular recognition and absorption. The peptide or peptidomimetic moiety can be about 5-50 amino acids long, e.g., about 5, 10, 15, 20, 25, 30, 35, 40, 45, or 50 amino acids long.

[0502] A peptide or peptidomimetic can be, for example, a cell permeation peptide, cationic peptide, amphipathic peptide, or hydrophobic peptide (e.g., consisting primarily of Tyr, Trp or Phe). The peptide moiety can be a dendrimer peptide, constrained peptide or crosslinked peptide. In another alternative, the peptide moiety can include a hydrophobic membrane translocation sequence (MTS). An exemplary hydrophobic MTS-containing peptide is RFGF having the amino acid sequence AAVALLPAVLLALLAP (SEQ ID NO:3367). An RFGF analogue (e.g., amino acid sequence AALLPVLLAAP (SEQ ID NO:3368)) containing a hydrophobic MTS can also be a targeting moiety. The peptide moiety can be a “delivery” peptide, which can carry large polar molecules including peptides, oligonucleotides, and protein across cell membranes. For example, sequences from the HIV Tat protein (GRKKRRQRRRPPQ (SEQ ID NO:3369)) and the Drosophila Antennapedia protein (RQIKIWFQNRRMKWKK (SEQ ID NO: 3370)) have been found to be capable of functioning as delivery peptides. A peptide or peptidomimetic can be encoded by a random sequence of DNA, such as a peptide identified from a phage-display library, or one-bead-one-compound (OBOC) combinatorial library (Lam et al., Nature, 354:82-84, 1991). Typically, the peptide or peptidomimetic tethered to a dsRNA agent via an incorporated monomer unit is a cell targeting peptide such as an arginine-glycine-aspartic acid (RGD)-peptide, or RGD mimic A peptide moiety can range in length from about 5 amino acids to about 40 amino acids. The peptide moieties can have a structural modification, such as to increase stability or direct conformational properties. Any of the structural modifications described below can be utilized.

[0503] An RGD peptide for use in the compositions and methods of the invention may be linear or cyclic, and may be modified, e.g., glycosylated or methylated, to facilitate targeting to a specific tissue(s). RGD-containing peptides and peptidiomimemtics may include D-amino acids, as well as synthetic RGD mimics. In addition to RGD, one can use other moieties that target the integrin ligand. Preferred conjugates of this ligand target PECAM-1 or VEGF.

[0504] An RGD peptide moiety can be used to target a particular cell type, e.g., a tumor cell, such as an endothelial tumor cell or a breast cancer tumor cell (Zitzmann et al., Cancer Res., 62:5139-43, 2002). An RGD peptide can facilitate targeting of an dsRNA agent to tumors of a variety of other tissues, including the lung, kidney, spleen, or liver (Aoki et al., Cancer Gene Therapy 8:783-787, 2001). Typically, the RGD peptide will facilitate targeting of an iRNA agent to the kidney. The RGD peptide can be linear or cyclic, and can be modified, e.g., glycosylated or methylated to facilitate targeting to specific tissues. For example, a glycosylated RGD peptide can deliver a iRNA agent to a tumor cell expressing α_{V}β₃ (Haubner et al., Jour. Nucl. Med., 42:326-336, 2001).

[0505] A “cell permeation peptide” is capable of permeating a cell, e.g., a microbial cell, such as a bacterial or fungal cell, or a mammalian cell, such as a human cell. A microbial cell-permeating peptide can be, for example, an α-helical linear peptide (e.g., LL-37 or Ceropin P1), a disulfide bond-containing peptide (e.g., α-defensin, β-defensin or bactenecin), or a peptide containing only one or two dominating amino acids (e.g., PR-39 or indolicidin). A cell permeation peptide can also include a nuclear localization signal (NLS). For example, a cell permeation peptide can be a bipartite amphipathic peptide, such as MPG, which is derived from the fusion peptide domain of HIV-1 gp41 and the NLS of SV40 large T antigen (Simeoni et al., Nucl. Acids Res. 31:2717-2724, 2003).

[0506] Carbohydrate Conjugates

[0507] In some embodiments of the compositions and methods of the invention, an iRNA oligonucleotide further comprises a carbohydrate. The carbohydrate conjugated iRNA are advantageous for the in vivo delivery of nucleic acids, as well as compositions suitable for in vivo therapeutic use, as described herein. As used herein, “carbohydrate” refers to a compound which is either a carbohydrate per se made up of one or more monosaccharide units having at least 6 carbon atoms (which can be linear, branched or cyclic) with an oxygen, nitrogen or sulfur atom bonded to each carbon atom; or a compound having as a part thereof a carbohydrate moiety made up of one or more monosaccharide units each having at least six carbon atoms (which can be linear, branched or cyclic), with an oxygen, nitrogen or sulfur atom bonded to each carbon atom. Representative carbohydrates include the sugars (mono-, di-, tri- and oligosaccharides containing from about 4, 5, 6, 7, 8, or 9 monosaccharide units), and polysaccharides such as starches, glycogen, cellulose and polysaccharide gums. Specific monosaccharides include C5 and above (e.g., C5, C6, C7, or C8) sugars; di- and trisaccharides include sugars having two or three monosaccharide units (e.g., C5, C6, C7, or C8).

[0508] In one embodiment, a carbohydrate conjugate comprises a monosaccharide. In one embodiment, the monosaccharide is an N-acetylgalactosamine (GalNAc). GalNAc conjugates are described, for example, in U.S. Pat. No. 8,106,022, the entire content of which is hereby incorporated herein by reference. In some embodiments, the GalNAc conjugate serves as a ligand that targets the iRNA to particular cells. In some embodiments, the GalNAc conjugate targets the iRNA to liver cells, e.g., by serving as a ligand for the asialoglycoprotein receptor of liver cells (e.g., hepatocytes).

[0509] In some embodiments, the carbohydrate conjugate comprises one or more GalNAc derivatives. The GalNAc derivatives may be attached via a linker, e.g., a bivalent or trivalent branched linker. In some embodiments the GalNAc conjugate is conjugated to the 3′ end of the sense strand. In some embodiments, the GalNAc conjugate is conjugated to the iRNA agent (e.g., to the 3′ end of the sense strand) via a linker, e.g., a linker as described herein.

[0510] In some embodiments, the GalNAc conjugate is

[chemical structure]

[0511] In some embodiments, the RNAi agent is attached to the carbohydrate conjugate via a linker as shown in the following schematic, wherein X is O or S

[chemical structure]

[0512] In some embodiments, the RNAi agent is conjugated to L96 as defined in Table 1 and shown below

[chemical structure]

[0513] In some embodiments, a carbohydrate conjugate for use in the compositions and methods of the invention is selected from the group consisting of:

[chemical structure]

[chemical structure]

[chemical structure]

[chemical structure]

[chemical structure]

[0514] Another representative carbohydrate conjugate for use in the embodiments described herein includes, but is not limited to,

[chemical structure]

[0515] (Formula XXIII), when one of X or Y is an oligonucleotide, the other is a hydrogen.

[0516] In some embodiments, the carbohydrate conjugate further comprises one or more additional ligands as described above, such as, but not limited to, a PK modulator and/or a cell permeation peptide.

[0517] In one embodiment, an iRNA of the invention is conjugated to a carbohydrate through a linker Non-limiting examples of iRNA carbohydrate conjugates with linkers of the compositions and methods of the invention include, but are not limited to,

[chemical structure]

[chemical structure]

when one of X or Y is an oligonucleotide, the other is a hydrogen.

[0518] Linkers

[0519] In some embodiments, the conjugate or ligand described herein can be attached to an iRNA oligonucleotide with various linkers that can be cleavable or non-cleavable.

[0520] The term “linker” or “linking group” means an organic moiety that connects two parts of a compound, e.g., covalently attaches two parts of a compound. Linkers typically comprise a direct bond or an atom such as oxygen or sulfur, a unit such as NR8, C(O), C(O)NH, SO, SO₂, SO₂NH or a chain of atoms, such as, but not limited to, substituted or unsubstituted alkyl, substituted or unsubstituted alkenyl, substituted or unsubstituted alkynyl, arylalkyl, arylalkenyl, arylalkynyl, heteroarylalkyl, heteroarylalkenyl, heteroarylalkynyl, heterocyclylalkyl, heterocyclylalkenyl, heterocyclylalkynyl, aryl, heteroaryl, heterocyclyl, cycloalkyl, cycloalkenyl, alkylarylalkyl, alkylarylalkenyl, alkylarylalkynyl, alkenylarylalkyl, alkenylarylalkenyl, alkenylarylalkynyl, alkynylarylalkyl, alkynylarylalkenyl, alkynylarylalkynyl, alkylheteroarylalkyl, alkylheteroarylalkenyl, alkylheteroarylalkynyl, alkenylheteroarylalkyl, alkenylheteroarylalkenyl, alkenylheteroarylalkynyl, alkynylheteroarylalkyl, alkynylheteroarylalkenyl, alkynylheteroarylalkynyl, alkylheterocyclylalkyl, alkylheterocyclylalkenyl, alkylhererocyclylalkynyl, alkenylheterocyclylalkyl, alkenylheterocyclylalkenyl, alkenylheterocyclylalkynyl, alkynylheterocyclylalkyl, alkynylheterocyclylalkenyl, alkynylheterocyclylalkynyl, alkylaryl, alkenylaryl, alkynylaryl, alkylheteroaryl, alkenylheteroaryl, alkynylhereroaryl, which one or more methylenes can be interrupted or terminated by O, S, S(O), SO₂, N(R8), C(O), substituted or unsubstituted aryl, substituted or unsubstituted heteroaryl, substituted or unsubstituted heterocyclic; where R8 is hydrogen, acyl, aliphatic or substituted aliphatic. In one embodiment, the linker is between about 1-24 atoms, 2-24, 3-24, 4-24, 5-24, 6-24, 6-18, 7-18, 8-18 atoms, 7-17, 8-17, 6-16, 7-16, or 8-16 atoms.

[0521] In one embodiment, a dsRNA of the invention is conjugated to a bivalent or trivalent branched linker selected from the group of structures shown in any of formula (XXXI)-(XXXIV):

[chemical structure]

wherein:
q2A, q2B, q3A, q3B, q4A, q4B, q5A, q5B and q5C represent independently for each occurrence 0-20 and wherein the repeating unit can be the same or different;
P^{2A}, P^{2B}, P^{3A}, P^{3B}, P^{4A}, P^{4B}, P^{5A}, P^{5B}, P^{5C}, T^{2A}, T^{2B}, T^{3A}, T^{3B}, T^{4A}, T^{4B}, T^{4A}, T^{5B}, T^{5C} are each independently for each occurrence absent, CO, NH, O, S, OC(O), NHC(O), CH₂, CH₂NH or CH₂O;
Q^{2A}, Q^{2B}, Q^{3A}, Q^{3B}, Q^{4A}, Q^{4B}, Q^{5A}, Q^{5B}, Q^{5C} are independently for each occurrence absent, alkylene, substituted alkylene wherein one or more methylenes can be interrupted or terminated by one or more of O, S, S(O), SO₂, N(R^{N}), C(R′)═C(R″), C≡C or C(O);
R^{2A}, R^{2B}, R^{3A}, R^{3B}, R^{4A}, R^{4B}, R^{5A}, R^{5B}, R^{5C} are each independently for each occurrence absent, NH, O, S, CH₂, C(O)O, C(O)NH, NHCH(R^{a})C(O), —C(O)—CH(R^{a})—NH—, CO, CH═N—O,

[chemical structure]

heterocyclyl;

[0522] L^{2A}, L^{2B}, L^{3A}, L^{3B}, L^{4A}, L^{4B}, L^{5A}, L^{5B} and L^{5C} represent the ligand; i.e. each independently for each occurrence a monosaccharide (such as GalNAc), disaccharide, trisaccharide, tetrasaccharide, oligosaccharide, or polysaccharide; and R^{a} is H or amino acid side chain. Trivalent conjugating GalNAc derivatives are particularly useful for use with RNAi agents for inhibiting the expression of a target gene, such as those of formula (XXXV):

[chemical structure]

[0523] wherein L^{5A}, L^{5B} and L^{5C} represent a monosaccharide, such as GalNAc derivative.

[0524] Examples of suitable bivalent and trivalent branched linker groups conjugating GalNAc derivatives include, but are not limited to, the structures recited above as formulas II, VII, XI, X, and XIII.

[0525] A cleavable linking group is one which is sufficiently stable outside the cell, but which upon entry into a target cell is cleaved to release the two parts the linker is holding together. In a preferred embodiment, the cleavable linking group is cleaved at least about 10 times, 20, times, 30 times, 40 times, 50 times, 60 times, 70 times, 80 times, 90 times or more, or at least about 100 times faster in a target cell or under a first reference condition (which can, e.g., be selected to mimic or represent intracellular conditions) than in the blood of a subject, or under a second reference condition (which can, e.g., be selected to mimic or represent conditions found in the blood or serum).

[0526] Cleavable linking groups are susceptible to cleavage agents, e.g., pH, redox potential or the presence of degradative molecules. Generally, cleavage agents are more prevalent or found at higher levels or activities inside cells than in serum or blood. Examples of such degradative agents include: redox agents which are selected for particular substrates or which have no substrate specificity, including, e.g., oxidative or reductive enzymes or reductive agents such as mercaptans, present in cells, that can degrade a redox cleavable linking group by reduction; esterases; endosomes or agents that can create an acidic environment, e.g., those that result in a pH of five or lower; enzymes that can hydrolyze or degrade an acid cleavable linking group by acting as a general acid, peptidases (which can be substrate specific), and phosphatases.

[0527] A cleavable linkage group, such as a disulfide bond can be susceptible to pH. The pH of human serum is 7.4, while the average intracellular pH is slightly lower, ranging from about 7.1-7.3. Endosomes have a more acidic pH, in the range of 5.5-6.0, and lysosomes have an even more acidic pH at around 5.0. Some linkers will have a cleavable linking group that is cleaved at a preferred pH, thereby releasing a cationic lipid from the ligand inside the cell, or into the desired compartment of the cell.

[0528] A linker can include a cleavable linking group that is cleavable by a particular enzyme. The type of cleavable linking group incorporated into a linker can depend on the cell to be targeted. For example, a liver-targeting ligand can be linked to a cationic lipid through a linker that includes an ester group. Liver cells are rich in esterases, and therefore the linker will be cleaved more efficiently in liver cells than in cell types that are not esterase-rich. Other cell-types rich in esterases include cells of the lung, renal cortex, and testis.

[0529] Linkers that contain peptide bonds can be used when targeting cell types rich in peptidases, such as liver cells and synoviocytes.

[0530] In general, the suitability of a candidate cleavable linking group can be evaluated by testing the ability of a degradative agent (or condition) to cleave the candidate linking group. It will also be desirable to also test the candidate cleavable linking group for the ability to resist cleavage in the blood or when in contact with other non-target tissue. Thus, one can determine the relative susceptibility to cleavage between a first and a second condition, where the first is selected to be indicative of cleavage in a target cell and the second is selected to be indicative of cleavage in other tissues or biological fluids, e.g., blood or serum. The evaluations can be carried out in cell free systems, in cells, in cell culture, in organ or tissue culture, or in whole animals. It can be useful to make initial evaluations in cell-free or culture conditions and to confirm by further evaluations in whole animals. In preferred embodiments, useful candidate compounds are cleaved at least about 2, 4, 10, 20, 30, 40, 50, 60, 70, 80, 90, or about 100 times faster in the cell (or under in vitro conditions selected to mimic intracellular conditions) as compared to blood or serum (or under in vitro conditions selected to mimic extracellular conditions).

[0531] Redox Cleavable Linking Groups

[0532] In one embodiment, a cleavable linking group is a redox cleavable linking group that is cleaved upon reduction or oxidation. An example of reductively cleavable linking group is a disulphide linking group (—S—S—). To determine if a candidate cleavable linking group is a suitable “reductively cleavable linking group,” or for example is suitable for use with a particular iRNA moiety and particular targeting agent one can look to methods described herein. For example, a candidate can be evaluated by incubation with dithiothreitol (DTT), or other reducing agent using reagents know in the art, which mimic the rate of cleavage which would be observed in a cell, e.g., a target cell. The candidates can also be evaluated under conditions which are selected to mimic blood or serum conditions. In one, candidate compounds are cleaved by at most about 10% in the blood. In other embodiments, useful candidate compounds are degraded at least about 2, 4, 10, 20, 30, 40, 50, 60, 70, 80, 90, or about 100 times faster in the cell (or under in vitro conditions selected to mimic intracellular conditions) as compared to blood (or under in vitro conditions selected to mimic extracellular conditions). The rate of cleavage of candidate compounds can be determined using standard enzyme kinetics assays under conditions chosen to mimic intracellular media and compared to conditions chosen to mimic extracellular media.

[0533] Phosphate-Based Cleavable Linking Groups

[0534] In another embodiment, a cleavable linker comprises a phosphate-based cleavable linking group. A phosphate-based cleavable linking group is cleaved by agents that degrade or hydrolyze the phosphate group. An example of an agent that cleaves phosphate groups in cells are enzymes such as phosphatases in cells. Examples of phosphate-based linking groups are —O—P(O)(ORk)-O—, —O—P(S)(ORk)-O—, —O—P(S)(SRk)-O—, —S—P(O)(ORk)-O—, —O—P(O)(ORk)-S—, —S—P(O)(ORk)-S—, —O—P(S)(ORk)-S—, —S—P(S)(ORk)-O—, —O—P(O)(Rk)-O—, —O—P(S)(Rk)-O—, —S—P(O)(Rk)-O—, —S—P(S)(Rk)-O—, —S—P(O)(Rk)-S—, —O—P(S)(Rk)-S—. Preferred embodiments are —O—P(O)(OH)—O—, —O—P(S)(OH)—O—, —O—P(S)(SH)—O—, —S—P(O)(OH)—O—, —O—P(O)(OH)—S—, —S—P(O)(OH)—S—, —O—P(S)(OH)—S—, —S—P(S)(OH)—O—, —O—P(O)(H)—O—, —O—P(S)(H)—O—, —S—P(O)(H)—O, —S—P(S)(H)—O—, —S—P(O)(H)—S—, —O—P(S)(H)—S—. A preferred embodiment is —O—P(O)(OH)—O—. These candidates can be evaluated using methods analogous to those described above.

[0535] Acid Cleavable Linking Groups

[0536] In another embodiment, a cleavable linker comprises an acid cleavable linking group. An acid cleavable linking group is a linking group that is cleaved under acidic conditions. In preferred embodiments acid cleavable linking groups are cleaved in an acidic environment with a pH of about 6.5 or lower (e.g., about 6.0, 5.75, 5.5, 5.25, 5.0, or lower), or by agents such as enzymes that can act as a general acid. In a cell, specific low pH organelles, such as endosomes and lysosomes can provide a cleaving environment for acid cleavable linking groups. Examples of acid cleavable linking groups include but are not limited to hydrazones, esters, and esters of amino acids. Acid cleavable groups can have the general formula —C═NN—, C(O)O, or —OC(O). A preferred embodiment is when the carbon attached to the oxygen of the ester (the alkoxy group) is an aryl group, substituted alkyl group, or tertiary alkyl group such as dimethyl pentyl or t-butyl. These candidates can be evaluated using methods analogous to those described above.

[0537] Ester-Based Cleavable Linking Groups

[0538] In another embodiment, a cleavable linker comprises an ester-based cleavable linking group. An ester-based cleavable linking group is cleaved by enzymes such as esterases and amidases in cells. Examples of ester-based cleavable linking groups include but are not limited to esters of alkylene, alkenylene and alkynylene groups. Ester cleavable linking groups have the general formula —C(O)O—, or —OC(O)—. These candidates can be evaluated using methods analogous to those described above.

[0539] Peptide-Based Cleavable Linking Groups

[0540] In yet another embodiment, a cleavable linker comprises a peptide-based cleavable linking group. A peptide-based cleavable linking group is cleaved by enzymes such as peptidases and proteases in cells. Peptide-based cleavable linking groups are peptide bonds formed between amino acids to yield oligopeptides (e.g., dipeptides, tripeptides etc.) and polypeptides. Peptide-based cleavable groups do not include the amide group (—C(O)NH—). The amide group can be formed between any alkylene, alkenylene or alkynelene. A peptide bond is a special type of amide bond formed between amino acids to yield peptides and proteins. The peptide based cleavage group is generally limited to the peptide bond (i.e., the amide bond) formed between amino acids yielding peptides and proteins and does not include the entire amide functional group. Peptide-based cleavable linking groups have the general formula —NHCHRAC(O)NHCHRBC(O)—, where RA and RB are the R groups of the two adjacent amino acids. These candidates can be evaluated using methods analogous to those described above.

[0541] Representative U.S. patents that teach the preparation of RNA conjugates include, but are not limited to, U.S. Pat. Nos. 4,828,979; 4,948,882; 5,218,105; 5,525,465; 5,541,313; 5,545,730; 5,552,538; 5,578,717, 5,580,731; 5,591,584; 5,109,124; 5,118,802; 5,138,045; 5,414,077; 5,486,603; 5,512,439; 5,578,718; 5,608,046; 4,587,044; 4,605,735; 4,667,025; 4,762,779; 4,789,737; 4,824,941; 4,835,263; 4,876,335; 4,904,582; 4,958,013; 5,082,830; 5,112,963; 5,214,136; 5,082,830; 5,112,963; 5,214,136; 5,245,022; 5,254,469; 5,258,506; 5,262,536; 5,272,250; 5,292,873; 5,317,098; 5,371,241, 5,391,723; 5,416,203, 5,451,463; 5,510,475; 5,512,667; 5,514,785; 5,565,552; 5,567,810; 5,574,142; 5,585,481; 5,587,371; 5,595,726; 5,597,696; 5,599,923; 5,599,928 and 5,688,941; 6,294,664; 6,320,017; 6,576,752; 6,783,931; 6,900,297; 7,037,646; 8,106,022, the entire contents of each of which is herein incorporated by reference.

[0542] It is not necessary for all positions in a given compound to be uniformly modified, and in fact more than one of the aforementioned modifications may be incorporated in a single compound or even at a single nucleoside within an iRNA. The present invention also includes iRNA compounds that are chimeric compounds.

[0543] “Chimeric” iRNA compounds, or “chimeras,” in the context of the present invention, are iRNA compounds, e.g., dsRNAs, that contain two or more chemically distinct regions, each made up of at least one monomer unit, i.e., a nucleotide in the case of a dsRNA compound. These iRNAs typically contain at least one region wherein the RNA is modified so as to confer upon the iRNA increased resistance to nuclease degradation, increased cellular uptake, and/or increased binding affinity for the target nucleic acid. An additional region of the iRNA may serve as a substrate for enzymes capable of cleaving RNA:DNA or RNA:RNA hybrids. By way of example, RNase H is a cellular endonuclease which cleaves the RNA strand of an RNA:DNA duplex. Activation of RNase H, therefore, results in cleavage of the RNA target, thereby greatly enhancing the efficiency of iRNA inhibition of gene expression. Consequently, comparable results can often be obtained with shorter iRNAs when chimeric dsRNAs are used, compared to phosphorothioate deoxy dsRNAs hybridizing to the same target region. Cleavage of the RNA target can be routinely detected by gel electrophoresis and, if necessary, associated nucleic acid hybridization techniques known in the art.

[0544] In certain instances, the RNA of an iRNA can be modified by a non-ligand group. A number of non-ligand molecules have been conjugated to iRNAs in order to enhance the activity, cellular distribution or cellular uptake of the iRNA, and procedures for performing such conjugations are available in the scientific literature. Such non-ligand moieties have included lipid moieties, such as cholesterol (Kubo, T. et al., Biochem. Biophys. Res. Comm, 2007, 365(1):54-61; Letsinger et al., Proc. Natl. Acad. Sci. USA, 1989, 86:6553), cholic acid (Manoharan et al., Bioorg. Med. Chem. Lett., 1994, 4:1053), a thioether, e.g., hexyl-S-tritylthiol (Manoharan et al., Ann. N.Y. Acad. Sci., 1992, 660:306; Manoharan et al., Bioorg. Med. Chem. Let., 1993, 3:2765), a thiocholesterol (Oberhauser et al., Nucl. Acids Res., 1992, 20:533), an aliphatic chain, e.g., dodecandiol or undecyl residues (Saison-Behmoaras et al., EMBO J., 1991, 10:111; Kabanov et al., FEBS Lett., 1990, 259:327; Svinarchuk et al., Biochimie, 1993, 75:49), a phospholipid, e.g., di-hexadecyl-rac-glycerol or triethylammonium 1,2-di-O-hexadecyl-rac-glycero-3-H-phosphonate (Manoharan et al., Tetrahedron Lett., 1995, 36:3651; Shea et al., Nucl. Acids Res., 1990, 18:3777), a polyamine or a polyethylene glycol chain (Manoharan et al., Nucleosides & Nucleotides, 1995, 14:969), or adamantane acetic acid (Manoharan et al., Tetrahedron Lett., 1995, 36:3651), a palmityl moiety (Mishra et al., Biochim. Biophys. Acta, 1995, 1264:229), or an octadecylamine or hexylamino-carbonyl-oxycholesterol moiety (Crooke et al., J. Pharmacol. Exp. Ther., 1996, 277:923). Representative United States patents that teach the preparation of such RNA conjugates have been listed above. Typical conjugation protocols involve the synthesis of an RNAs bearing an aminolinker at one or more positions of the sequence. The amino group is then reacted with the molecule being conjugated using appropriate coupling or activating reagents. The conjugation reaction may be performed either with the RNA still bound to the solid support or following cleavage of the RNA, in solution phase. Purification of the RNA conjugate by HPLC typically affords the pure conjugate.

[0545] Delivery of iRNA

[0546] The delivery of an iRNA to a subject in need thereof can be achieved in a number of different ways. In vivo delivery can be performed directly by administering a composition comprising an iRNA, e.g. a dsRNA, to a subject. Alternatively, delivery can be performed indirectly by administering one or more vectors that encode and direct the expression of the iRNA. These alternatives are discussed further below.

[0547] Direct Delivery

[0548] In general, any method of delivering a nucleic acid molecule can be adapted for use with an iRNA (see e.g., Akhtar S. and Julian R L. (1992) Trends Cell. Biol. 2(5):139-144 and WO94/02595, which are incorporated herein by reference in their entireties). However, there are three factors that are important to consider in order to successfully deliver an iRNA molecule in vivo: (a) biological stability of the delivered molecule, (2) preventing non-specific effects, and (3) accumulation of the delivered molecule in the target tissue. The non-specific effects of an iRNA can be minimized by local administration, for example by direct injection or implantation into a tissue (as a non-limiting example, a tumor) or topically administering the preparation. Local administration to a treatment site maximizes local concentration of the agent, limits the exposure of the agent to systemic tissues that may otherwise be harmed by the agent or that may degrade the agent, and permits a lower total dose of the iRNA molecule to be administered. Several studies have shown successful knockdown of gene products when an iRNA is administered locally. For example, intraocular delivery of a VEGF dsRNA by intravitreal injection in cynomolgus monkeys (Tolentino, M J et al (2004) Retina 24:132-138) and subretinal injections in mice (Reich, S J., et al (2003) Mol. Vis. 9:210-216) were both shown to prevent neovascularization in an experimental model of age-related macular degeneration. In addition, direct intratumoral injection of a dsRNA in mice reduces tumor volume (Pille, J., et al (2005) Mol. Ther. 11:267-274) and can prolong survival of tumor-bearing mice (Kim, W J., et al (2006) Mol. Ther. 14:343-350; Li, S., et al (2007) Mol. Ther. 15:515-523). RNA interference has also shown success with local delivery to the CNS by direct injection (Dorn, G., et al. (2004) Nucleic Acids 32:e49; Tan, P H., et al (2005) Gene Ther. 12:59-66; Makimura, H., et al (2002) BMC Neurosci. 3:18; Shishkina, G T., et al (2004) Neuroscience 129:521-528; Thakker, E R., et al (2004) Proc. Natl. Acad. Sci. U.S.A. 101:17270-17275; Akaneya, Y., et al (2005) J. Neurophysiol. 93:594-602) and to the lungs by intranasal administration (Howard, K A., et al (2006) Mol. Ther. 14:476-484; Zhang, X., et al (2004) J. Biol. Chem. 279:10677-10684; Bitko, V., et al (2005) Nat. Med. 11:50-55). For administering an iRNA systemically for the treatment of a disease, the RNA can be modified or alternatively delivered using a drug delivery system; both methods act to prevent the rapid degradation of the dsRNA by endo- and exo-nucleases in vivo.

[0549] Modification of the RNA or the pharmaceutical carrier can also permit targeting of the iRNA composition to the target tissue and avoid undesirable off-target effects. iRNA molecules can be modified by chemical conjugation to other groups, e.g., a lipid or carbohydrate group as described herein. Such conjugates can be used to target iRNA to particular cells, e.g., liver cells, e.g., hepatocytes. For example, GalNAc conjugates or lipid (e.g., LNP) formulations can be used to target iRNA to particular cells, e.g., liver cells, e.g., hepatocytes.

[0550] Lipophilic groups such as cholesterol to enhance cellular uptake and prevent degradation. For example, an iRNA directed against ApoB conjugated to a lipophilic cholesterol moiety was injected systemically into mice and resulted in knockdown of apoB mRNA in both the liver and jejunum (Soutschek, J., et al (2004) Nature 432:173-178). Conjugation of an iRNA to an aptamer has been shown to inhibit tumor growth and mediate tumor regression in a mouse model of prostate cancer (McNamara, J O., et al (2006) Nat. Biotechnol. 24:1005-1015). In an alternative embodiment, the iRNA can be delivered using drug delivery systems such as a nanoparticle, a dendrimer, a polymer, liposomes, or a cationic delivery system. Positively charged cationic delivery systems facilitate binding of an iRNA molecule (negatively charged) and also enhance interactions at the negatively charged cell membrane to permit efficient uptake of an iRNA by the cell. Cationic lipids, dendrimers, or polymers can either be bound to an iRNA, or induced to form a vesicle or micelle (see e.g., Kim S H., et al (2008) Journal of Controlled Release 129(2):107-116) that encases an iRNA. The formation of vesicles or micelles further prevents degradation of the iRNA when administered systemically. Methods for making and administering cationic-iRNA complexes are well within the abilities of one skilled in the art (see e.g., Sorensen, D R., et al (2003) J. Mol. Biol 327:761-766; Verma, U N., et al (2003) Clin. Cancer Res. 9:1291-1300; Arnold, A S et al (2007) J. Hypertens. 25:197-205, which are incorporated herein by reference in their entirety). Some non-limiting examples of drug delivery systems useful for systemic delivery of iRNAs include DOTAP (Sorensen, D R., et al (2003), supra; Verma, U N., et al (2003), supra), Oligofectamine, “solid nucleic acid lipid particles” (Zimmermann, T S., et al (2006) Nature 441:111-114), cardiolipin (Chien, P Y., et al (2005) Cancer Gene Ther. 12:321-328; Pal, A., et al (2005) Int J. Oncol. 26:1087-1091), polyethyleneimine (Bonnet M E., et al (2008) Pharm. Res. August 16 Epub ahead of print; Aigner, A. (2006) J. Biomed. Biotechnol. 71659), Arg-Gly-Asp (RGD) peptides (Liu, S. (2006) Mol. Pharm. 3:472-487), and polyamidoamines (Tomalia, D A., et al (2007) Biochem. Soc. Trans. 35:61-67; Yoo, H., et al (1999) Pharm. Res. 16:1799-1804). In some embodiments, an iRNA forms a complex with cyclodextrin for systemic administration. Methods for administration and pharmaceutical compositions of iRNAs and cyclodextrins can be found in U.S. Pat. No. 7,427,605, which is herein incorporated by reference in its entirety.

[0551] Vector Encoded iRNAs

[0552] In another aspect, iRNA targeting the ALAS1 gene can be expressed from transcription units inserted into DNA or RNA vectors (see, e.g., Couture, A, et al., TIG. (1996), 12:5-10; Skillern, A., et al., International PCT Publication No. WO 00/22113, Conrad, International PCT Publication No. WO 00/22114, and Conrad, U.S. Pat. No. 6,054,299). Expression can be transient (on the order of hours to weeks) or sustained (weeks to months or longer), depending upon the specific construct used and the target tissue or cell type. These transgenes can be introduced as a linear construct, a circular plasmid, or a viral vector, which can be an integrating or non-integrating vector. The transgene can also be constructed to permit it to be inherited as an extrachromosomal plasmid (Gassmann, et al., Proc. Natl. Acad. Sci. USA (1995) 92:1292).

[0553] The individual strand or strands of an iRNA can be transcribed from a promoter on an expression vector. Where two separate strands are to be expressed to generate, for example, a dsRNA, two separate expression vectors can be co-introduced (e.g., by transfection or infection) into a target cell. Alternatively each individual strand of a dsRNA can be transcribed by promoters both of which are located on the same expression plasmid. In one embodiment, a dsRNA is expressed as an inverted repeat joined by a linker polynucleotide sequence such that the dsRNA has a stem and loop structure.

[0554] An iRNA expression vector is typically a DNA plasmid or viral vector. An expression vector compatible with eukaryotic cells, e.g., with vertebrate cells, can be used to produce recombinant constructs for the expression of an iRNA as described herein. Eukaryotic cell expression vectors are well known in the art and are available from a number of commercial sources. Typically, such vectors contain convenient restriction sites for insertion of the desired nucleic acid segment. Delivery of iRNA expressing vectors can be systemic, such as by intravenous or intramuscular administration, by administration to target cells ex-planted from the patient followed by reintroduction into the patient, or by any other means that allows for introduction into a desired target cell.

[0555] An iRNA expression plasmid can be transfected into a target cell as a complex with a cationic lipid carrier (e.g., Oligofectamine) or a non-cationic lipid-based carrier (e.g., Transit-TKO™). Multiple lipid transfections for iRNA-mediated knockdowns targeting different regions of a target RNA over a period of a week or more are also contemplated by the invention. Successful introduction of vectors into host cells can be monitored using various known methods. For example, transient transfection can be signaled with a reporter, such as a fluorescent marker, such as Green Fluorescent Protein (GFP). Stable transfection of cells ex vivo can be ensured using markers that provide the transfected cell with resistance to specific environmental factors (e.g., antibiotics and drugs), such as hygromycin B resistance.

[0556] Viral vector systems which can be utilized with the methods and compositions described herein include, but are not limited to, (a) adenovirus vectors; (b) retrovirus vectors, including but not limited to lentiviral vectors, moloney murine leukemia virus, etc.; (c) adeno-associated virus vectors; (d) herpes simplex virus vectors; (e) SV40 vectors; (f) polyoma virus vectors; (g) papilloma virus vectors; (h) picornavirus vectors; (i) pox virus vectors such as an orthopox, e.g., vaccinia virus vectors or avipox, e.g. canary pox or fowl pox; and (j) a helper-dependent or gutless adenovirus. Replication-defective viruses can also be advantageous. Different vectors will or will not become incorporated into the cells' genome. The constructs can include viral sequences for transfection, if desired. Alternatively, the construct may be incorporated into vectors capable of episomal replication, e.g EPV and EBV vectors. Constructs for the recombinant expression of an iRNA will generally require regulatory elements, e.g., promoters, enhancers, etc., to ensure the expression of the iRNA in target cells. Other aspects to consider for vectors and constructs are further described below.

[0557] Vectors useful for the delivery of an iRNA will include regulatory elements (promoter, enhancer, etc.) sufficient for expression of the iRNA in the desired target cell or tissue. The regulatory elements can be chosen to provide either constitutive or regulated/inducible expression.

[0558] Expression of the iRNA can be precisely regulated, for example, by using an inducible regulatory sequence that is sensitive to certain physiological regulators, e.g., circulating glucose levels, or hormones (Docherty et al., 1994, FASEB J. 8:20-24). Such inducible expression systems, suitable for the control of dsRNA expression in cells or in mammals include, for example, regulation by ecdysone, by estrogen, progesterone, tetracycline, chemical inducers of dimerization, and isopropyl-β-D1-thiogalactopyranoside (IPTG). A person skilled in the art would be able to choose the appropriate regulatory/promoter sequence based on the intended use of the iRNA transgene.

[0559] In a specific embodiment, viral vectors that contain nucleic acid sequences encoding an iRNA can be used. For example, a retroviral vector can be used (see Miller et al., Meth. Enzymol. 217:581-599 (1993)). These retroviral vectors contain the components necessary for the correct packaging of the viral genome and integration into the host cell DNA. The nucleic acid sequences encoding an iRNA are cloned into one or more vectors, which facilitates delivery of the nucleic acid into a patient. More detail about retroviral vectors can be found, for example, in Boesen et al., Biotherapy 6:291-302 (1994), which describes the use of a retroviral vector to deliver the mdr1 gene to hematopoietic stem cells in order to make the stem cells more resistant to chemotherapy. Other references illustrating the use of retroviral vectors in gene therapy are: Clowes et al., J. Clin. Invest. 93:644-651 (1994); Kiem et al., Blood 83:1467-1473 (1994); Salmons and Gunzberg, Human Gene Therapy 4:129-141 (1993); and Grossman and Wilson, Curr. Opin. in Genetics and Devel. 3:110-114 (1993). Lentiviral vectors contemplated for use include, for example, the HIV based vectors described in U.S. Pat. Nos. 6,143,520; 5,665,557; and 5,981,276, which are herein incorporated by reference.

[0560] Adenoviruses are also contemplated for use in delivery of iRNAs. Adenoviruses are especially attractive vehicles, e.g., for delivering genes to respiratory epithelia. Adenoviruses naturally infect respiratory epithelia where they cause a mild disease. Other targets for adenovirus-based delivery systems are liver, the central nervous system, endothelial cells, and muscle. Adenoviruses have the advantage of being capable of infecting non-dividing cells. Kozarsky and Wilson, Current Opinion in Genetics and Development 3:499-503 (1993) present a review of adenovirus-based gene therapy. Bout et al., Human Gene Therapy 5:3-10 (1994) demonstrated the use of adenovirus vectors to transfer genes to the respiratory epithelia of rhesus monkeys. Other instances of the use of adenoviruses in gene therapy can be found in Rosenfeld et al., Science 252:431-434 (1991); Rosenfeld et al., Cell 68:143-155 (1992); Mastrangeli et al., J. Clin. Invest. 91:225-234 (1993); PCT Publication WO94/12649; and Wang, et al., Gene Therapy 2:775-783 (1995). A suitable AV vector for expressing an iRNA featured in the invention, a method for constructing the recombinant AV vector, and a method for delivering the vector into target cells, are described in Xia H et al. (2002), Nat. Biotech. 20: 1006-1010.

[0561] Use of Adeno-associated virus (AAV) vectors is also contemplated (Walsh et al., Proc. Soc. Exp. Biol. Med. 204:289-300 (1993); U.S. Pat. No. 5,436,146). In one embodiment, the iRNA can be expressed as two separate, complementary single-stranded RNA molecules from a recombinant AAV vector having, for example, either the U6 or H1 RNA promoters, or the cytomegalovirus (CMV) promoter. Suitable AAV vectors for expressing the dsRNA featured in the invention, methods for constructing the recombinant AV vector, and methods for delivering the vectors into target cells are described in Samulski R et al. (1987), J. Virol. 61: 3096-3101; Fisher K J et al. (1996), J. Virol, 70: 520-532; Samulski R et al. (1989), J. Virol. 63: 3822-3826; U.S. Pat. No. 5,252,479; U.S. Pat. No. 5,139,941; International Patent Application No. WO 94/13788; and International Patent Application No. WO 93/24641, the entire disclosures of which are herein incorporated by reference.

[0562] Another typical viral vector is a pox virus such as a vaccinia virus, for example an attenuated vaccinia such as Modified Virus Ankara (MVA) or NYVAC, an avipox such as fowl pox or canary pox.

[0563] The tropism of viral vectors can be modified by pseudotyping the vectors with envelope proteins or other surface antigens from other viruses, or by substituting different viral capsid proteins, as appropriate. For example, lentiviral vectors can be pseudotyped with surface proteins from vesicular stomatitis virus (VSV), rabies, Ebola, Mokola, and the like. AAV vectors can be made to target different cells by engineering the vectors to express different capsid protein serotypes; see, e.g., Rabinowitz J E et al. (2002), J Virol 76:791-801, the entire disclosure of which is herein incorporated by reference.

[0564] The pharmaceutical preparation of a vector can include the vector in an acceptable diluent, or can include a slow release matrix in which the gene delivery vehicle is imbedded. Alternatively, where the complete gene delivery vector can be produced intact from recombinant cells, e.g., retroviral vectors, the pharmaceutical preparation can include one or more cells which produce the gene delivery system.

### III. PHARMACEUTICAL COMPOSITIONS CONTAINING IRNA

[0565] In one embodiment, the invention provides pharmaceutical compositions containing an iRNA, as described herein, and a pharmaceutically acceptable carrier. The pharmaceutical composition containing the iRNA is useful for treating a disease or disorder related to the expression or activity of an ALAS1 gene (e.g., a disorder involving the porphyrin pathway). Such pharmaceutical compositions are formulated based on the mode of delivery. For example, compositions can be formulated for systemic administration via parenteral delivery, e.g., by intravenous (IV) delivery. In some embodiments, a composition provided herein (e.g., an LNP formulation) is formulated for intravenous delivery. In some embodiments, a composition provided herein (e.g., a composition comprising a GalNAc conjugate) is formulated for subcutaneous delivery.

[0566] The pharmaceutical compositions featured herein are administered in a dosage sufficient to inhibit expression of an ALAS1 gene. In general, a suitable dose of iRNA will be in the range of 0.01 to 200.0 milligrams per kilogram body weight of the recipient per day, generally in the range of 1 to 50 mg per kilogram body weight per day. For example, the dsRNA can be administered at 0.05 mg/kg, 0.5 mg/kg, 1 mg/kg, 1.5 mg/kg, 2 mg/kg, 3 mg/kg, 10 mg/kg, 20 mg/kg, 30 mg/kg, 40 mg/kg, or 50 mg/kg per single dose. The pharmaceutical composition may be administered once daily, or the iRNA may be administered as two, three, or more sub-doses at appropriate intervals throughout the day or even using continuous infusion or delivery through a controlled release formulation. In that case, the iRNA contained in each sub-dose must be correspondingly smaller in order to achieve the total daily dosage. The dosage unit can also be compounded for delivery over several days, e.g., using a conventional sustained release formulation which provides sustained release of the iRNA over a several day period. Sustained release formulations are well known in the art and are particularly useful for delivery of agents at a particular site, such as can be used with the agents of the present invention. In this embodiment, the dosage unit contains a corresponding multiple of the daily dose.

[0567] The effect of a single dose on ALAS1 levels can be long lasting, such that subsequent doses are administered at not more than 3, 4, or 5 day intervals, or at not more than 1, 2, 3, or 4 week intervals.

[0568] The skilled artisan will appreciate that certain factors may influence the dosage and timing required to effectively treat a subject, including but not limited to the severity of the disease or disorder, previous treatments, the general health and/or age of the subject, and other diseases present. Moreover, treatment of a subject with a therapeutically effective amount of a composition can include a single treatment or a series of treatments. Estimates of effective dosages and in vivo half-lives for the individual iRNAs encompassed by the invention can be made using conventional methodologies or on the basis of in vivo testing using an appropriate animal model, as described elsewhere herein.

[0569] Advances in mouse genetics have generated a number of mouse models for the study of various human diseases, such as pathological processes related to ALAS1 expression (e.g., pathological processes involving porphyrins or defects in the porphyrin pathway, such as, for example, porphyrias). Such models can be used for in vivo testing of iRNA, as well as for determining a therapeutically effective dose and/or an effective dosing regimen.

[0570] A suitable mouse model is, for example, a mouse containing a transgene expressing human ALAS1. Mice that have knock-in mutations (e.g., mutations that are associated with acute hepatic porphyrias in humans) can be used to determine the therapeutically effective dosage and/or duration of administration of ALAS1 siRNA. The present invention also includes pharmaceutical compositions and formulations that include the iRNA compounds featured in the invention. The pharmaceutical compositions of the present invention may be administered in a number of ways depending upon whether local or systemic treatment is desired and upon the area to be treated. Administration may be topical (e.g., by a transdermal patch), pulmonary, e.g., by inhalation or insufflation of powders or aerosols, including by nebulizer; intratracheal, intranasal, epidermal and transdermal, oral or parenteral. Parenteral administration includes intravenous, intraarterial, subcutaneous, intraperitoneal or intramuscular injection or infusion; subdermal, e.g., via an implanted device; or intracranial, e.g., by intraparenchymal, intrathecal or intraventricular, administration.

[0571] The iRNA can be delivered in a manner to target a particular tissue, such as a tissue that produces erythrocytes. For example, the iRNA can be delivered to bone marrow, liver (e.g., hepatocyes of liver), lymph glands, spleen, lungs (e.g., pleura of lungs) or spine. In one embodiment, the iRNA is delivered to bone marrow.

[0572] Pharmaceutical compositions and formulations for topical administration may include transdermal patches, ointments, lotions, creams, gels, drops, suppositories, sprays, liquids and powders. Conventional pharmaceutical carriers, aqueous, powder or oily bases, thickeners and the like may be necessary or desirable. Coated condoms, gloves and the like may also be useful. Suitable topical formulations include those in which the iRNAs featured in the invention are in admixture with a topical delivery agent such as lipids, liposomes, fatty acids, fatty acid esters, steroids, chelating agents and surfactants. Suitable lipids and liposomes include neutral (e.g., dioleoylphosphatidyl DOPE ethanolamine, dimyristoylphosphatidyl choline DMPC, distearolyphosphatidyl choline) negative (e.g., dimyristoylphosphatidyl glycerol DMPG) and cationic (e.g., dioleoyltetramethylaminopropyl DOTAP and dioleoylphosphatidyl ethanolamine DOTMA). iRNAs featured in the invention may be encapsulated within liposomes or may form complexes thereto, in particular to cationic liposomes. Alternatively, iRNAs may be complexed to lipids, in particular to cationic lipids. Suitable fatty acids and esters include but are not limited to arachidonic acid, oleic acid, eicosanoic acid, lauric acid, caprylic acid, capric acid, myristic acid, palmitic acid, stearic acid, linoleic acid, linolenic acid, dicaprate, tricaprate, monoolein, dilaurin, glyceryl 1-monocaprate, 1-dodecylazacycloheptan-2-one, an acylcarnitine, an acylcholine, or a C₁₋₂₀ alkyl ester (e.g., isopropylmyristate IPM), monoglyceride, diglyceride or pharmaceutically acceptable salt thereof. Topical formulations are described in detail in U.S. Pat. No. 6,747,014, which is incorporated herein by reference.

[0573] Liposomal Formulations

[0574] There are many organized surfactant structures besides microemulsions that have been studied and used for the formulation of drugs. These include monolayers, micelles, bilayers and vesicles. Vesicles, such as liposomes, have attracted great interest because of their specificity and the duration of action they offer from the standpoint of drug delivery. As used in the present invention, the term “liposome” means a vesicle composed of amphiphilic lipids arranged in a spherical bilayer or bilayers.

[0575] Liposomes are unilamellar or multilamellar vesicles which have a membrane formed from a lipophilic material and an aqueous interior. The aqueous portion contains the composition to be delivered. Cationic liposomes possess the advantage of being able to fuse to the cell wall. Non-cationic liposomes, although not able to fuse as efficiently with the cell wall, are taken up by macrophages in vivo.

[0576] In order to traverse intact mammalian skin, lipid vesicles must pass through a series of fine pores, each with a diameter less than 50 nm, under the influence of a suitable transdermal gradient. Therefore, it is desirable to use a liposome which is highly deformable and able to pass through such fine pores.

[0577] Further advantages of liposomes include; liposomes obtained from natural phospholipids are biocompatible and biodegradable; liposomes can incorporate a wide range of water and lipid soluble drugs; liposomes can protect encapsulated drugs in their internal compartments from metabolism and degradation (Rosoff, in Pharmaceutical Dosage Forms, Lieberman, Rieger and Banker (Eds.), 1988, Marcel Dekker, Inc., New York, N.Y., volume 1, p. 245) Important considerations in the preparation of liposome formulations are the lipid surface charge, vesicle size and the aqueous volume of the liposomes.

[0578] Liposomes are useful for the transfer and delivery of active ingredients to the site of action. Because the liposomal membrane is structurally similar to biological membranes, when liposomes are applied to a tissue, the liposomes start to merge with the cellular membranes and as the merging of the liposome and cell progresses, the liposomal contents are emptied into the cell where the active agent may act.

[0579] Liposomal formulations have been the focus of extensive investigation as the mode of delivery for many drugs. There is growing evidence that for topical administration, liposomes present several advantages over other formulations. Such advantages include reduced side-effects related to high systemic absorption of the administered drug, increased accumulation of the administered drug at the desired target, and the ability to administer a wide variety of drugs, both hydrophilic and hydrophobic, into the skin.

[0580] Several reports have detailed the ability of liposomes to deliver agents including high-molecular weight DNA into the skin. Compounds including analgesics, antibodies, hormones and high-molecular weight DNAs have been administered to the skin. The majority of applications resulted in the targeting of the upper epidermis

[0581] Liposomes fall into two broad classes. Cationic liposomes are positively charged liposomes which interact with the negatively charged DNA molecules to form a stable complex. The positively charged DNA/liposome complex binds to the negatively charged cell surface and is internalized in an endosome. Due to the acidic pH within the endosome, the liposomes are ruptured, releasing their contents into the cell cytoplasm (Wang et al., Biochem. Biophys. Res. Commun., 1987, 147, 980-985).

[0582] Liposomes which are pH-sensitive or negatively-charged, entrap DNA rather than complex with it. Since both the DNA and the lipid are similarly charged, repulsion rather than complex formation occurs. Nevertheless, some DNA is entrapped within the aqueous interior of these liposomes. pH-sensitive liposomes have been used to deliver DNA encoding the thymidine kinase gene to cell monolayers in culture. Expression of the exogenous gene was detected in the target cells (Zhou et al., Journal of Controlled Release, 1992, 19, 269-274).

[0583] One major type of liposomal composition includes phospholipids other than naturally-derived phosphatidylcholine. Neutral liposome compositions, for example, can be formed from dimyristoyl phosphatidylcholine (DMPC) or dipalmitoyl phosphatidylcholine (DPPC). Anionic liposome compositions generally are formed from dimyristoyl phosphatidylglycerol, while anionic fusogenic liposomes are formed primarily from dioleoyl phosphatidylethanolamine (DOPE). Another type of liposomal composition is formed from phosphatidylcholine (PC) such as, for example, soybean PC, and egg PC. Another type is formed from mixtures of phospholipid and/or phosphatidylcholine and/or cholesterol.

[0584] Several studies have assessed the topical delivery of liposomal drug formulations to the skin Application of liposomes containing interferon to guinea pig skin resulted in a reduction of skin herpes sores while delivery of interferon via other means (e.g., as a solution or as an emulsion) were ineffective (Weiner et al., Journal of Drug Targeting, 1992, 2, 405-410). Further, an additional study tested the efficacy of interferon administered as part of a liposomal formulation to the administration of interferon using an aqueous system, and concluded that the liposomal formulation was superior to aqueous administration (du Plessis et al., Antiviral Research, 1992, 18, 259-265).

[0585] Non-ionic liposomal systems have also been examined to determine their utility in the delivery of drugs to the skin, in particular systems comprising non-ionic surfactant and cholesterol. Non-ionic liposomal formulations comprising Novasome™ I (glyceryl dilaurate/cholesterol/polyoxyethylene-10-stearyl ether) and Novasome™ II (glyceryl distearate/cholesterol/polyoxyethylene-10-stearyl ether) were used to deliver cyclosporin-A into the dermis of mouse skin Results indicated that such non-ionic liposomal systems were effective in facilitating the deposition of cyclosporin-A into different layers of the skin (Hu et al. S.T.P.Pharma. Sci., 1994, 4, 6, 466).

[0586] Liposomes also include “sterically stabilized” liposomes, a term which, as used herein, refers to liposomes comprising one or more specialized lipids that, when incorporated into liposomes, result in enhanced circulation lifetimes relative to liposomes lacking such specialized lipids. Examples of sterically stabilized liposomes are those in which part of the vesicle-forming lipid portion of the liposome (A) comprises one or more glycolipids, such as monosialoganglioside G_{M1}, or (B) is derivatized with one or more hydrophilic polymers, such as a polyethylene glycol (PEG) moiety. While not wishing to be bound by any particular theory, it is thought in the art that, at least for sterically stabilized liposomes containing gangliosides, sphingomyelin, or PEG-derivatized lipids, the enhanced circulation half-life of these sterically stabilized liposomes derives from a reduced uptake into cells of the reticuloendothelial system (RES) (Allen et al., FEBS Letters, 1987, 223, 42; Wu et al., Cancer Research, 1993, 53, 3765).

[0587] Various liposomes comprising one or more glycolipids are known in the art. Papahadjopoulos et al. (Ann. N.Y. Acad. Sci., 1987, 507, 64) reported the ability of monosialoganglioside G_{M1}, galactocerebroside sulfate and phosphatidylinositol to improve blood half-lives of liposomes. These findings were expounded upon by Gabizon et al. (Proc. Natl. Acad. Sci. U.S.A., 1988, 85, 6949). U.S. Pat. No. 4,837,028 and WO 88/04924, both to Allen et al., disclose liposomes comprising (1) sphingomyelin and (2) the ganglioside G_{M1} or a galactocerebroside sulfate ester. U.S. Pat. No. 5,543,152 (Webb et al.) discloses liposomes comprising sphingomyelin. Liposomes comprising 1,2-sn-dimyristoylphosphatidylcholine are disclosed in WO 97/13499 (Lim et al).

[0588] Many liposomes comprising lipids derivatized with one or more hydrophilic polymers, and methods of preparation thereof, are known in the art. Sunamoto et al. (Bull. Chem. Soc. Jpn., 1980, 53, 2778) described liposomes comprising a nonionic detergent, 2C_{1215G}, that contains a PEG moiety. Illum et al. (FEBS Lett., 1984, 167, 79) noted that hydrophilic coating of polystyrene particles with polymeric glycols results in significantly enhanced blood half-lives. Synthetic phospholipids modified by the attachment of carboxylic groups of polyalkylene glycols (e.g., PEG) are described by Sears (U.S. Pat. Nos. 4,426,330 and 4,534,899). Klibanov et al. (FEBS Lett., 1990, 268, 235) described experiments demonstrating that liposomes comprising phosphatidylethanolamine (PE) derivatized with PEG or PEG stearate have significant increases in blood circulation half-lives. Blume et al. (Biochimica et Biophysica Acta, 1990, 1029, 91) extended such observations to other PEG-derivatized phospholipids, e.g., DSPE-PEG, formed from the combination of distearoylphosphatidylethanolamine (DSPE) and PEG. Liposomes having covalently bound PEG moieties on their external surface are described in European Patent No. EP 0 445 131 B1 and WO 90/04384 to Fisher. Liposome compositions containing 1-20 mole percent of PE derivatized with PEG, and methods of use thereof, are described by Woodle et al. (U.S. Pat. Nos. 5,013,556 and 5,356,633) and Martin et al. (U.S. Pat. No. 5,213,804 and European Patent No. EP 0 496 813 B1). Liposomes comprising a number of other lipid-polymer conjugates are disclosed in WO 91/05545 and U.S. Pat. No. 5,225,212 (both to Martin et al.) and in WO 94/20073 (Zalipsky et al.) Liposomes comprising PEG-modified ceramide lipids are described in WO 96/10391 (Choi et al). U.S. Pat. No. 5,540,935 (Miyazaki et al.) and U.S. Pat. No. 5,556,948 (Tagawa et al.) describe PEG-containing liposomes that can be further derivatized with functional moieties on their surfaces.

[0589] A number of liposomes comprising nucleic acids are known in the art. WO 96/40062 to Thierry et al. discloses methods for encapsulating high molecular weight nucleic acids in liposomes. U.S. Pat. No. 5,264,221 to Tagawa et al. discloses protein-bonded liposomes and asserts that the contents of such liposomes may include a dsRNA. U.S. Pat. No. 5,665,710 to Rahman et al. describes certain methods of encapsulating oligodeoxynucleotides in liposomes. WO 97/04787 to Love et al. discloses liposomes comprising dsRNAs targeted to the raf gene.

[0590] Transfersomes are yet another type of liposomes, and are highly deformable lipid aggregates which are attractive candidates for drug delivery vehicles. Transfersomes may be described as lipid droplets which are so highly deformable that they are easily able to penetrate through pores which are smaller than the droplet. Transfersomes are adaptable to the environment in which they are used, e.g., they are self-optimizing (adaptive to the shape of pores in the skin), self-repairing, frequently reach their targets without fragmenting, and often self-loading. To make transfersomes it is possible to add surface edge-activators, usually surfactants, to a standard liposomal composition. Transfersomes have been used to deliver serum albumin to the skin. The transfersome-mediated delivery of serum albumin has been shown to be as effective as subcutaneous injection of a solution containing serum albumin.

[0591] Surfactants find wide application in formulations such as emulsions (including microemulsions) and liposomes. The most common way of classifying and ranking the properties of the many different types of surfactants, both natural and synthetic, is by the use of the hydrophile/lipophile balance (HLB). The nature of the hydrophilic group (also known as the “head”) provides the most useful means for categorizing the different surfactants used in formulations (Rieger, in Pharmaceutical Dosage Forms, Marcel Dekker, Inc., New York, N.Y., 1988, p. 285).

[0592] If the surfactant molecule is not ionized, it is classified as a nonionic surfactant. Nonionic surfactants find wide application in pharmaceutical and cosmetic products and are usable over a wide range of pH values. In general their HLB values range from 2 to about 18 depending on their structure. Nonionic surfactants include nonionic esters such as ethylene glycol esters, propylene glycol esters, glyceryl esters, polyglyceryl esters, sorbitan esters, sucrose esters, and ethoxylated esters. Nonionic alkanolamides and ethers such as fatty alcohol ethoxylates, propoxylated alcohols, and ethoxylated/propoxylated block polymers are also included in this class. The polyoxyethylene surfactants are the most popular members of the nonionic surfactant class.

[0593] If the surfactant molecule carries a negative charge when it is dissolved or dispersed in water, the surfactant is classified as anionic. Anionic surfactants include carboxylates such as soaps, acyl lactylates, acyl amides of amino acids, esters of sulfuric acid such as alkyl sulfates and ethoxylated alkyl sulfates, sulfonates such as alkyl benzene sulfonates, acyl isethionates, acyl taurates and sulfosuccinates, and phosphates. The most important members of the anionic surfactant class are the alkyl sulfates and the soaps.

[0594] If the surfactant molecule carries a positive charge when it is dissolved or dispersed in water, the surfactant is classified as cationic. Cationic surfactants include quaternary ammonium salts and ethoxylated amines. The quaternary ammonium salts are the most used members of this class.

[0595] If the surfactant molecule has the ability to carry either a positive or negative charge, the surfactant is classified as amphoteric Amphoteric surfactants include acrylic acid derivatives, substituted alkylamides, N-alkylbetaines and phosphatides.

[0596] The use of surfactants in drug products, formulations and in emulsions has been reviewed (Rieger, in Pharmaceutical Dosage Forms, Marcel Dekker, Inc., New York, N.Y., 1988, p. 285).

[0597] Nucleic Acid Lipid Particles

[0598] In one embodiment, an ALAS1 dsRNA featured in the invention is fully encapsulated in the lipid formulation, e.g., to form a SPLP, pSPLP, SNALP, or other nucleic acid-lipid particle. As used herein, the term “SNALP” refers to a stable nucleic acid-lipid particle, including SPLP. As used herein, the term “SPLP” refers to a nucleic acid-lipid particle comprising plasmid DNA encapsulated within a lipid vesicle. SNALPs and SPLPs typically contain a cationic lipid, a non-cationic lipid, and a lipid that prevents aggregation of the particle (e.g., a PEG-lipid conjugate). SNALPs and SPLPs are extremely useful for systemic applications, as they exhibit extended circulation lifetimes following intravenous (i.v.) injection and accumulate at distal sites (e.g., sites physically separated from the administration site). SPLPs include “pSPLP,” which include an encapsulated condensing agent-nucleic acid complex as set forth in PCT Publication No. WO 00/03683. The particles of the present invention typically have a mean diameter of about 50 nm to about 150 nm, more typically about 60 nm to about 130 nm, more typically about 70 nm to about 110 nm, most typically about 70 nm to about 90 nm, and are substantially nontoxic. In addition, the nucleic acids when present in the nucleic acid-lipid particles of the present invention are resistant in aqueous solution to degradation with a nuclease. Nucleic acid-lipid particles and their method of preparation are disclosed in, e.g., U.S. Pat. Nos. 5,976,567; 5,981,501; 6,534,484; 6,586,410; 6,815,432; and PCT Publication No. WO 96/40964.

[0599] In one embodiment, the lipid to drug ratio (mass/mass ratio) (e.g., lipid to dsRNA ratio) will be in the range of from about 1:1 to about 50:1, from about 1:1 to about 25:1, from about 3:1 to about 15:1, from about 4:1 to about 10:1, from about 5:1 to about 9:1, or about 6:1 to about 9:1.

[0600] The cationic lipid may be, for example, N,N-dioleyl-N,N-dimethylammonium chloride (DODAC), N,N-distearyl-N,N-dimethylammonium bromide (DDAB), N—(I-(2,3-dioleoyloxy)propyl)-N,N,N-trimethylammonium chloride (DOTAP), N—(I-(2,3-dioleyloxy)propyl)-N,N,N-trimethylammonium chloride (DOTMA), N,N-dimethyl-2,3-dioleyloxy)propylamine (DODMA), 1,2-DiLinoleyloxy-N,N-dimethylaminopropane (DLinDMA), 1,2-Dilinolenyloxy-N,N-dimethylaminopropane (DLenDMA), 1,2-Dilinoleylcarbamoyloxy-3-dimethylaminopropane (DLin-C-DAP), 1,2-Dilinoleyoxy-3-(dimethylamino)acetoxypropane (DLin-DAC), 1,2-Dilinoleyoxy-3-morpholinopropane (DLin-MA), 1,2-Dilinoleoyl-3-dimethylaminopropane (DLinDAP), 1,2-Dilinoleylthio-3-dimethylaminopropane (DLin-S-DMA), 1-Linoleoyl-2-linoleyloxy-3-dimethylaminopropane (DLin-2-DMAP), 1,2-Dilinoleyloxy-3-trimethylaminopropane chloride salt (DLin-TMA.C1), 1,2-Dilinoleoyl-3-trimethylaminopropane chloride salt (DLin-TAP.C1), 1,2-Dilinoleyloxy-3-(N-methylpiperazino)propane (DLin-MPZ), or 3-(N,N-Dilinoleylamino)-1,2-propanediol (DLinAP), 3-(N,N-Dioleylamino)-1,2-propanedio (DOAP), 1,2-Dilinoleyloxo-3-(2-N,N-dimethylamino)ethoxypropane (DLin-EG-DMA), 1,2-Dilinolenyloxy-N,N-dimethylaminopropane (DLinDMA), 2,2-Dilinoleyl-4-dimethylaminomethyl-[1,3]-dioxolane (DLin-K-DMA) or analogs thereof, (3aR,5s,6aS)-N,N-dimethyl-2,2-di((9Z,12Z)-octadeca-9,12-dienyl)tetrahydro-3aH-cyclopenta[d][1,3]dioxol-5-amine (ALN100), (6Z,9Z,28Z,31Z)-heptatriaconta-6,9,28,31-tetraen-19-yl 4-(dimethylamino)butanoate (MC3), 1,1′-(2-(4-(2-((2-(bis(2-hydroxydodecyl)amino)ethyl)(2-hydroxydodecyl)amino)ethyl)piperazin-1-yl)ethylazanediyl)didodecan-2-ol (Tech G1), or a mixture thereof. The cationic lipid may comprise from about 20 mol % to about 50 mol % or about 40 mol % of the total lipid present in the particle.

[0601] In another embodiment, the compound 2,2-Dilinoleyl-4-dimethylaminoethyl-[1,3]-dioxolane can be used to prepare lipid-siRNA nanoparticles. Synthesis of 2,2-Dilinoleyl-4-dimethylaminoethyl-[1,3]-dioxolane is described in U.S. provisional patent application No. 61/107,998 filed on Oct. 23, 2008, which is herein incorporated by reference.

[0602] In one embodiment, the lipid-siRNA particle includes 40% 2,2-Dilinoleyl-4-dimethylaminoethyl-[1,3]-dioxolane: 10% DSPC: 40% Cholesterol: 10% PEG-C-DOMG (mole percent) with a particle size of 63.0±20 nm and a 0.027 siRNA/Lipid Ratio.

[0603] The non-cationic lipid may be an anionic lipid or a neutral lipid including, but not limited to, distearoylphosphatidylcholine (DSPC), dioleoylphosphatidylcholine (DOPC), dipalmitoylphosphatidylcholine (DPPC), dioleoylphosphatidylglycerol (DOPG), dipalmitoylphosphatidylglycerol (DPPG), dioleoyl-phosphatidylethanolamine (DOPE), palmitoyloleoylphosphatidylcholine (POPC), palmitoyloleoylphosphatidylethanolamine (POPE), dioleoyl-phosphatidylethanolamine 4-(N-maleimidomethyl)-cyclohexane-1-carboxylate (DOPE-mal), dipalmitoyl phosphatidyl ethanolamine (DPPE), dimyristoylphosphoethanolamine (DMPE), distearoyl-phosphatidyl-ethanolamine (DSPE), 16-O-monomethyl PE, 16-O-dimethyl PE, 18-1-trans PE, 1-stearoyl-2-oleoyl-phosphatidyethanolamine (SOPE), cholesterol, or a mixture thereof. The non-cationic lipid may be from about 5 mol % to about 90 mol %, about 10 mol %, or about 58 mol % if cholesterol is included, of the total lipid present in the particle.

[0604] The conjugated lipid that inhibits aggregation of particles may be, for example, a polyethyleneglycol (PEG)-lipid including, without limitation, a PEG-diacylglycerol (DAG), a PEG-dialkyloxypropyl (DAA), a PEG-phospholipid, a PEG-ceramide (Cer), or a mixture thereof. The PEG-DAA conjugate may be, for example, a PEG-dilauryloxypropyl (Ci₂), a PEG-dimyristyloxypropyl (Ci₄), a PEG-dipalmityloxypropyl (Ci₆), or a PEG-distearyloxypropyl (C]₈). The conjugated lipid that prevents aggregation of particles may be from 0 mol % to about 20 mol % or about 2 mol % of the total lipid present in the particle.

[0605] In some embodiments, the nucleic acid-lipid particle further includes cholesterol at, e.g., about 10 mol % to about 60 mol % or about 48 mol % of the total lipid present in the particle.

[0606] In some embodiments, the iRNA is formulated in a lipid nanoparticle (LNP).

[0607] LNP01

[0608] In one embodiment, the lipidoid ND98.4HCl (MW 1487) (see U.S. patent application Ser. No. 12/056,230, filed Mar. 26, 2008, which is herein incorporated by reference), Cholesterol (Sigma-Aldrich), and PEG-Ceramide C16 (Avanti Polar Lipids) can be used to prepare lipid-dsRNA nanoparticles (e.g., LNP01 particles). Stock solutions of each in ethanol can be prepared as follows: ND98, 133 mg/ml; Cholesterol, 25 mg/ml, PEG-Ceramide C16, 100 mg/ml. The ND98, Cholesterol, and PEG-Ceramide C16 stock solutions can then be combined in a, e.g., 42:48:10 molar ratio. The combined lipid solution can be mixed with aqueous dsRNA (e.g., in sodium acetate pH 5) such that the final ethanol concentration is about 35-45% and the final sodium acetate concentration is about 100-300 mM. Lipid-dsRNA nanoparticles typically form spontaneously upon mixing. Depending on the desired particle size distribution, the resultant nanoparticle mixture can be extruded through a polycarbonate membrane (e.g., 100 nm cut-off) using, for example, a thermobarrel extruder, such as Lipex Extruder (Northern Lipids, Inc). In some cases, the extrusion step can be omitted. Ethanol removal and simultaneous buffer exchange can be accomplished by, for example, dialysis or tangential flow filtration. Buffer can be exchanged with, for example, phosphate buffered saline (PBS) at about pH 7, e.g., about pH 6.9, about pH 7.0, about pH 7.1, about pH 7.2, about pH 7.3, or about pH 7.4.

[chemical structure]

[0609] LNP01 formulations are described, e.g., in International Application Publication No. WO 2008/042973, which is hereby incorporated by reference.

[0610] Additional exemplary lipid-dsRNA formulations are provided in the following table.

TABLE 10
Exemplary lipid formulations

| | | cationic lipid/non-cationic |
|---|---|---|
| | | lipid/cholesterol/PEG-lipid conjugate |
| | Cationic Lipid | Lipid:siRNA ratio |
| SNALP | 1,2-Dilinolenyloxy-N,N- | DLinDMA/DPPC/Cholesterol/PEG-cDMA |
| | dimethylaminopropane (DLinDMA) | (57.1/7.1/34.4/1.4) |
| | | lipid:siRNA~7:1 |
| S-XTC | 2,2-Dilinoleyl-4-dimethylaminoethyl- | XTC/DPPC/Cholesterol/PEG-cDMA |
| | [1,3]-dioxolane (XTC) | 57.1/7.1/34.4/1.4 |
| | | lipid:siRNA~7:1 |
| LNP05 | 2,2-Dilinoleyl-4-dimethylaminoethyl- | XTC/DSPC/Cholesterol/PEG-DMG |
| | [1,3]-dioxolane (XTC) | 57.5/7.5/31.5/3.5 |
| | | lipid:siRNA~6:1 |
| LNP06 | 2,2-Dilinoleyl-4-dimethylaminoethyl- | XTC/DSPC/Cholesterol/PEG-DMG |
| | [1,3]-dioxolane (XTC) | 57.5/7.5/31.5/3.5 |
| | | lipid:siRNA~11:1 |
| LNP07 | 2,2-Dilinoleyl-4-dimethylaminoethyl- | XTC/DSPC/Cholesterol/PEG-DMG |
| | [1,3]-dioxolane (XTC) | 60/7.5/31/1.5, |
| | | lipid:siRNA~6:1 |
| LNP08 | 2,2-Dilinoleyl-4-dimethylaminoethyl- | XTC/DSPC/Cholesterol/PEG-DMG |
| | [1,3]-dioxolane (XTC) | 60/7.5/31/1.5, |
| | | lipid:siRNA~11:1 |
| LNP09 | 2,2-Dilinoleyl-4-dimethylaminoethyl- | XTC/DSPC/Cholesterol/PEG-DMG |
| | [1,3]-dioxolane (XTC) | 50/10/38.5/1.5 |
| | | Lipid:siRNA 10:1 |
| LNP10 | (3aR,5s,6aS)-N,N-dimethyl-2,2- | ALN100/DSPC/Cholesterol/PEG-DMG |
| | di((9Z,12Z)-octadeca-9,12- | 50/10/38.5/1.5 |
| | dienyl)tetrahydro-3aH- | Lipid:siRNA 10:1 |
| | cyclopenta[d][1,3]dioxol-5-amine | |
| | (ALN100) | |
| LNP11 | (6Z,9Z,28Z,31Z)-heptatriaconta- | MC-3/DSPC/Cholesterol/PEG-DMG |
| | 6,9,28,31-tetraen-19-yl 4- | 50/10/38.5/1.5 |
| | (dimethylamino)butanoate (MC3) | Lipid:siRNA 10:1 |
| LNP12 | 1,1′-(2-(4-(2-((2-(bis(2- | C12-200/DSPC/Cholesterol/PEG-DMG |
| | hydroxydodecyl)amino)ethyl)(2- | 50/10/38.5/1.5 |
| | hydroxydodecyl)amino)ethyl)piperazin- | Lipid:siRNA 10:1 |
| | 1-yl)ethylazanediyl)didodecan-2-ol | |
| | (C12-200) | |
| LNP13 | XTC | XTC/DSPC/Chol/PEG-DMG |
| | | 50/10/38.5/1.5 |
| | | Lipid:siRNA: 33:1 |
| LNP14 | MC3 | MC3/DSPC/Chol/PEG-DMG |
| | | 40/15/40/5 |
| | | Lipid:siRNA: 11:1 |
| LNP15 | MC3 | MC3/DSPC/Chol/PEG-DSG/GalNAc- |
| | | PEG-DSG |
| | | 50/10/35/4.5/0.5 |
| | | Lipid:siRNA: 11:1 |
| LNP16 | MC3 | MC3/DSPC/Chol/PEG-DMG |
| | | 50/10/38.5/1.5 |
| | | Lipid:siRNA: 7:1 |
| LNP17 | MC3 | MC3/DSPC/Chol/PEG-DSG |
| | | 50/10/38.5/1.5 |
| | | Lipid:siRNA: 10:1 |
| LNP18 | MC3 | MC3/DSPC/Chol/PEG-DMG |
| | | 50/10/38.5/1.5 |
| | | Lipid:siRNA: 12:1 |
| LNP19 | MC3 | MC3/DSPC/Chol/PEG-DMG |
| | | 50/10/35/5 |
| | | Lipid:siRNA: 8:1 |
| LNP20 | MC3 | MC3/DSPC/Chol/PEG-DPG |
| | | 50/10/38.5/1.5 |
| | | Lipid:siRNA: 10:1 |
| LNP21 | C12-200 | C12-200/DSPC/Chol/PEG-DSG |
| | | 50/10/38.5/1.5 |
| | | Lipid:siRNA: 7:1 |
| LNP22 | XTC | XTC/DSPC/Chol/PEG-DSG |
| | | 50/10/38.5/1.5 |
| | | Lipid:siRNA: 10:1 |

DSPC: distearoylphosphatidylcholine
DPPC: dipalmitoylphosphatidylcholine
PEG-DMG: PEG-didimyristoyl glycerol (C14-PEG, or PEG-C14) (PEG with avg mol wt of 2000)
PEG-DSG: PEG-distyryl glycerol (C18-PEG, or PEG-C18) (PEG with avg mol wt of 2000)
PEG-cDMA: PEG-carbamoyl-1,2-dimyristyloxypropylamine (PEG with avg mol wt of 2000)

[0611] SNALP (1,2-Dilinolenyloxy-N,N-dimethylaminopropane (DLinDMA)) comprising formulations are described in International Publication No. WO2009/127060, filed Apr. 15, 2009, which is hereby incorporated by reference.

[0612] XTC comprising formulations are described, e.g., in U.S. Provisional Ser. No. 61/148,366, filed Jan. 29, 2009; U.S. Provisional Ser. No. 61/156,851, filed Mar. 2, 2009; U.S. Provisional Serial No. filed Jun. 10, 2009; U.S. Provisional Ser. No. 61/228,373, filed Jul. 24, 2009; U.S. Provisional Ser. No. 61/239,686, filed Sep. 3, 2009, and International Application No. PCT/US2010/022614, filed Jan. 29, 2010, which are hereby incorporated by reference.

[0613] MC3 comprising formulations are described, e.g., in U.S. Provisional Ser. No. 61/244,834, filed Sep. 22, 2009, U.S. Provisional Ser. No. 61/185,800, filed Jun. 10, 2009, and International Application No. PCT/US10/28224, filed Jun. 10, 2010, which are hereby incorporated by reference.

[0614] ALNY-100 comprising formulations are described, e.g., International patent application number PCT/US09/63933, filed on Nov. 10, 2009, which is hereby incorporated by reference.

[0615] C12-200 comprising formulations are described in U.S. Provisional Ser. No. 61/175,770, filed May 5, 2009 and International Application No. PCT/US10/33777, filed May 5, 2010, which are hereby incorporated by reference.

[0616] Synthesis of Cationic Lipids

[0617] Any of the compounds, e.g., cationic lipids and the like, used in the nucleic acid-lipid particles featured in the invention may be prepared by known organic synthesis techniques, including the methods described in more detail in the Examples. All substituents are as defined below unless indicated otherwise.

[0618] “Alkyl” means a straight chain or branched, noncyclic or cyclic, saturated aliphatic hydrocarbon containing from 1 to 24 carbon atoms. Representative saturated straight chain alkyls include methyl, ethyl, n-propyl, n-butyl, n-pentyl, n-hexyl, and the like; while saturated branched alkyls include isopropyl, sec-butyl, isobutyl, tert-butyl, isopentyl, and the like. Representative saturated cyclic alkyls include cyclopropyl, cyclobutyl, cyclopentyl, cyclohexyl, and the like; while unsaturated cyclic alkyls include cyclopentenyl and cyclohexenyl, and the like.

[0619] “Alkenyl” means an alkyl, as defined above, containing at least one double bond between adjacent carbon atoms. Alkenyls include both cis and trans isomers. Representative straight chain and branched alkenyls include ethylenyl, propylenyl, 1-butenyl, 2-butenyl, isobutylenyl, 1-pentenyl, 2-pentenyl, 3-methyl-1-butenyl, 2-methyl-2-butenyl, 2,3-dimethyl-2-butenyl, and the like.

[0620] “Alkynyl” means any alkyl or alkenyl, as defined above, which additionally contains at least one triple bond between adjacent carbons. Representative straight chain and branched alkynyls include acetylenyl, propynyl, 1-butynyl, 2-butynyl, 1-pentynyl, 2-pentynyl, 3-methyl-1 butynyl, and the like.

[0621] “Acyl” means any alkyl, alkenyl, or alkynyl wherein the carbon at the point of attachment is substituted with an oxo group, as defined below. For example, —C(═O)alkyl, —C(═O)alkenyl, and —C(═O)alkynyl are acyl groups.

[0622] “Heterocycle” means a 5- to 7-membered monocyclic, or 7- to 10-membered bicyclic, heterocyclic ring which is either saturated, unsaturated, or aromatic, and which contains from 1 or 2 heteroatoms independently selected from nitrogen, oxygen and sulfur, and wherein the nitrogen and sulfur heteroatoms may be optionally oxidized, and the nitrogen heteroatom may be optionally quaternized, including bicyclic rings in which any of the above heterocycles are fused to a benzene ring. The heterocycle may be attached via any heteroatom or carbon atom. Heterocycles include heteroaryls as defined below. Heterocycles include morpholinyl, pyrrolidinonyl, pyrrolidinyl, piperidinyl, piperizynyl, hydantoinyl, valerolactamyl, oxiranyl, oxetanyl, tetrahydrofuranyl, tetrahydropyranyl, tetrahydropyridinyl, tetrahydroprimidinyl, tetrahydrothiophenyl, tetrahydrothiopyranyl, tetrahydropyrimidinyl, tetrahydrothiophenyl, tetrahydrothiopyranyl, and the like.

[0623] The terms “optionally substituted alkyl”, “optionally substituted alkenyl”, “optionally substituted alkynyl”, “optionally substituted acyl”, and “optionally substituted heterocycle” means that, when substituted, at least one hydrogen atom is replaced with a substituent. In the case of an oxo substituent (═O) two hydrogen atoms are replaced. In this regard, substituents include oxo, halogen, heterocycle, —CN, —OR′, —NR^{x}R^{y}, —NR^{x}C(═O)R^{y}, —NR^{x}SO₂R^{y}, —C(═O)R^{x}, —C(═O)OR^{x}, —C(═O)NR^{x}R^{y}, —SOₙR^{x} and —SOₙNR^{x}R^{y}, wherein n is 0, 1 or 2, R^{x} and R^{y} are the same or different and independently hydrogen, alkyl or heterocycle, and each of said alkyl and heterocycle substituents may be further substituted with one or more of oxo, halogen, —OH, —CN, alkyl, —OR′, heterocycle, —NR^{x}R^{y}, —NR^{x}C(═O)R^{y}, —NR^{x}SO₂R^{y}, —C(═O)R^{x}, —C(═O)OR^{x}, —C(═O)NR^{x}R^{y}, —SO—R^{x} and —SOₙNR^{x}R^{y}.

[0624] “Halogen” means fluoro, chloro, bromo and iodo.

[0625] In some embodiments, the methods featured in the invention may require the use of protecting groups. Protecting group methodology is well known to those skilled in the art (see, for example, PROTECTIVE GROUPS IN ORGANIC SYNTHESIS, Green, T. W. et al., Wiley-Interscience, New York City, 1999). Briefly, protecting groups within the context of this invention are any group that reduces or eliminates unwanted reactivity of a functional group. A protecting group can be added to a functional group to mask its reactivity during certain reactions and then removed to reveal the original functional group. In some embodiments an “alcohol protecting group” is used. An “alcohol protecting group” is any group which decreases or eliminates unwanted reactivity of an alcohol functional group. Protecting groups can be added and removed using techniques well known in the art.

[0626] Synthesis of Formula A

[0627] In one embodiments, nucleic acid-lipid particles featured in the invention are formulated using a cationic lipid of formula A:

[chemical structure]

where R1 and R2 are independently alkyl, alkenyl or alkynyl, each can be optionally substituted, and R3 and R4 are independently lower alkyl or R3 and R4 can be taken together to form an optionally substituted heterocyclic ring. In some embodiments, the cationic lipid is XTC (2,2-Dilinoleyl-4-dimethylaminoethyl-[1,3]-dioxolane). In general, the lipid of formula A above may be made by the following Reaction Schemes 1 or 2, wherein all substituents are as defined above unless indicated otherwise.

[chemical structure]

[0628] Lipid A, where R₁ and R₂ are independently alkyl, alkenyl or alkynyl, each can be optionally substituted, and R₃ and R₄ are independently lower alkyl or R₃ and R₄ can be taken together to form an optionally substituted heterocyclic ring, can be prepared according to Scheme 1. Ketone 1 and bromide 2 can be purchased or prepared according to methods known to those of ordinary skill in the art. Reaction of 1 and 2 yields ketal 3. Treatment of ketal 3 with amine 4 yields lipids of formula A. The lipids of formula A can be converted to the corresponding ammonium salt with an organic salt of formula 5, where X is anion counter ion selected from halogen, hydroxide, phosphate, sulfate, or the like.

[chemical structure]

[0629] Alternatively, the ketone 1 starting material can be prepared according to Scheme 2. Grignard reagent 6 and cyanide 7 can be purchased or prepared according to methods known to those of ordinary skill in the art. Reaction of 6 and 7 yields ketone 1. Conversion of ketone 1 to the corresponding lipids of formula A is as described in Scheme 1.

[0630] Synthesis of MC3

[0631] Preparation of DLin-M-C3-DMA (i.e., (6Z,9Z,28Z,31Z)-heptatriaconta-6,9,28,31-tetraen-19-yl 4-(dimethylamino)butanoate) was as follows. A solution of (6Z,9Z,28Z,31Z)-heptatriaconta-6,9,28,31-tetraen-19-ol (0.53 g), 4-N,N-dimethylaminobutyric acid hydrochloride (0.51 g), 4-N,N-dimethylaminopyridine (0.61 g) and 1-ethyl-3-(3-dimethylaminopropyl)carbodiimide hydrochloride (0.53 g) in dichloromethane (5 mL) was stirred at room temperature overnight. The solution was washed with dilute hydrochloric acid followed by dilute aqueous sodium bicarbonate. The organic fractions were dried over anhydrous magnesium sulphate, filtered and the solvent removed on a rotovap. The residue was passed down a silica gel column (20 g) using a 1-5% methanol/dichloromethane elution gradient. Fractions containing the purified product were combined and the solvent removed, yielding a colorless oil (0.54 g).

[0632] Synthesis of ALNY-100

[0633] Synthesis of ketal 519 [ALNY-100] was performed using the following scheme 3:

[chemical structure]

[0634] Synthesis of 515:

[0635] To a stirred suspension of LiAlH4 (3.74 g, 0.09852 mol) in 200 ml anhydrous THF in a two neck RBF (1 L), was added a solution of 514 (10 g, 0.04926 mol) in 70 mL of THF slowly at 0° C. under nitrogen atmosphere. After complete addition, reaction mixture was warmed to room temperature and then heated to reflux for 4 h. Progress of the reaction was monitored by TLC. After completion of reaction (by TLC) the mixture was cooled to 0° C. and quenched with careful addition of saturated Na2SO4 solution. Reaction mixture was stirred for 4 h at room temperature and filtered off. Residue was washed well with THF. The filtrate and washings were mixed and diluted with 400 mL dioxane and 26 mL conc. HCl and stirred for 20 minutes at room temperature. The volatilities were stripped off under vacuum to furnish the hydrochloride salt of 515 as a white solid. Yield: 7.12 g 1H-NMR (DMSO, 400 MHz): δ=9.34 (broad, 2H), 5.68 (s, 2H), 3.74 (m, 1H), 2.66-2.60 (m, 2H), 2.50-2.45 (m, 5H).

[0636] Synthesis of 516:

[0637] To a stirred solution of compound 515 in 100 mL dry DCM in a 250 mL two neck RBF, was added NEt3 (37.2 mL, 0.2669 mol) and cooled to 0° C. under nitrogen atmosphere. After a slow addition of N-(benzyloxy-carbonyloxy)-succinimide (20 g, 0.08007 mol) in 50 mL dry DCM, reaction mixture was allowed to warm to room temperature. After completion of the reaction (2-3 h by TLC) mixture was washed successively with 1N HCl solution (1×100 mL) and saturated NaHCO3 solution (1×50 mL) The organic layer was then dried over anhyd. Na2SO4 and the solvent was evaporated to give crude material which was purified by silica gel column chromatography to get 516 as sticky mass. Yield: 11 g (89%). 1H-NMR (CDCl3, 400 MHz): δ=7.36-7.27 (m, 5H), 5.69 (s, 2H), 5.12 (s, 2H), 4.96 (br., 1H) 2.74 (s, 3H), 2.60 (m, 2H), 2.30-2.25 (m, 2H). LC-MS [M+H]-232.3 (96.94%).

[0638] Synthesis of 517A and 517B:

[0639] The cyclopentene 516 (5 g, 0.02164 mol) was dissolved in a solution of 220 mL acetone and water (10:1) in a single neck 500 mL RBF and to it was added N-methyl morpholine-N-oxide (7.6 g, 0.06492 mol) followed by 4.2 mL of 7.6% solution of OsO4 (0.275 g, 0.00108 mol) in tert-butanol at room temperature. After completion of the reaction (˜3 h), the mixture was quenched with addition of solid Na2SO3 and resulting mixture was stirred for 1.5 h at room temperature. Reaction mixture was diluted with DCM (300 mL) and washed with water (2×100 mL) followed by saturated NaHCO3 (1×50 mL) solution, water (1×30 mL) and finally with brine (1×50 mL) Organic phase was dried over an.Na2SO4 and solvent was removed in vacuum Silica gel column chromatographic purification of the crude material was afforded a mixture of diastereomers, which were separated by prep HPLC. Yield: −6 g crude

[0640] 517A—Peak-1 (white solid), 5.13 g (96%). 1H-NMR (DMSO, 400 MHz): δ=7.39-7.31 (m, 5H), 5.04 (s, 2H), 4.78-4.73 (m, 1H), 4.48-4.47 (d, 2H), 3.94-3.93 (m, 2H), 2.71 (s, 3H), 1.72-1.67 (m, 4H). LC-MS—[M+H]-266.3, [M+NH4+]-283.5 present, HPLC-97.86%. Stereochemistry confirmed by X-ray.

[0641] Synthesis of 518:

[0642] Using a procedure analogous to that described for the synthesis of compound 505, compound 518 (1.2 g, 41%) was obtained as a colorless oil. 1H-NMR (CDCl3, 400 MHz): δ=7.35-7.33 (m, 4H), 7.30-7.27 (m, 1H), 5.37-5.27 (m, 8H), 5.12 (s, 2H), 4.75 (m, 1H), 4.58-4.57 (m, 2H), 2.78-2.74 (m, 7H), 2.06-2.00 (m, 8H), 1.96-1.91 (m, 2H), 1.62 (m, 4H), 1.48 (m, 2H), 1.37-1.25 (br m, 36H), 0.87 (m, 6H). HPLC-98.65%.

[0643] General Procedure for the Synthesis of Compound 519:

[0644] A solution of compound 518 (1 eq) in hexane (15 mL) was added in a drop-wise fashion to an ice-cold solution of LAH in THF (1 M, 2 eq). After complete addition, the mixture was heated at 40° C. over 0.5 h then cooled again on an ice bath. The mixture was carefully hydrolyzed with saturated aqueous Na2SO4 then filtered through celite and reduced to an oil. Column chromatography provided the pure 519 (1.3 g, 68%) which was obtained as a colorless oil. 13C NMR=130.2, 130.1 (x2), 127.9 (x3), 112.3, 79.3, 64.4, 44.7, 38.3, 35.4, 31.5, 29.9 (x2), 29.7, 29.6 (x2), 29.5 (x3), 29.3 (x2), 27.2 (x3), 25.6, 24.5, 23.3, 226, 14.1; Electrospray MS (+ve): Molecular weight for C44H80NO2 (M+H)+ Calc. 654.6. Found 654.6.

[0645] Formulations prepared by either the standard or extrusion-free method can be characterized in similar manners. For example, formulations are typically characterized by visual inspection. They should be whitish translucent solutions free from aggregates or sediment. Particle size and particle size distribution of lipid-nanoparticles can be measured by light scattering using, for example, a Malvern Zetasizer Nano ZS (Malvern, USA). Particles should be about 20-300 nm, such as 40-100 nm in size. The particle size distribution should be unimodal. The total dsRNA concentration in the formulation, as well as the entrapped fraction, is estimated using a dye exclusion assay. A sample of the formulated dsRNA can be incubated with an RNA-binding dye, such as Ribogreen (Molecular Probes) in the presence or absence of a formulation disrupting surfactant, e.g., 0.5% Triton-X100. The total dsRNA in the formulation can be determined by the signal from the sample containing the surfactant, relative to a standard curve. The entrapped fraction is determined by subtracting the “free” dsRNA content (as measured by the signal in the absence of surfactant) from the total dsRNA content. Percent entrapped dsRNA is typically >85%. For SNALP formulation, the particle size is at least 30 nm, at least 40 nm, at least 50 nm, at least 60 nm, at least 70 nm, at least 80 nm, at least 90 nm, at least 100 nm, at least 110 nm, and at least 120 nm. The suitable range is typically about at least 50 nm to about at least 110 nm, about at least 60 nm to about at least 100 nm, or about at least 80 nm to about at least 90 nm.

[0646] Compositions and formulations for oral administration include powders or granules, microparticulates, nanoparticulates, suspensions or solutions in water or non-aqueous media, capsules, gel capsules, sachets, tablets or minitablets. Thickeners, flavoring agents, diluents, emulsifiers, dispersing aids or binders may be desirable. In some embodiments, oral formulations are those in which dsRNAs featured in the invention are administered in conjunction with one or more penetration enhancers surfactants and chelators. Suitable surfactants include fatty acids and/or esters or salts thereof, bile acids and/or salts thereof. Suitable bile acids/salts include chenodeoxycholic acid (CDCA) and ursodeoxychenodeoxycholic acid (UDCA), cholic acid, dehydrocholic acid, deoxycholic acid, glucholic acid, glycholic acid, glycodeoxycholic acid, taurocholic acid, taurodeoxycholic acid, sodium tauro-24,25-dihydro-fusidate and sodium glycodihydrofusidate. Suitable fatty acids include arachidonic acid, undecanoic acid, oleic acid, lauric acid, caprylic acid, capric acid, myristic acid, palmitic acid, stearic acid, linoleic acid, linolenic acid, dicaprate, tricaprate, monoolein, dilaurin, glyceryl 1-monocaprate, 1-dodecylazacycloheptan-2-one, an acylcarnitine, an acylcholine, or a monoglyceride, a diglyceride or a pharmaceutically acceptable salt thereof (e.g., sodium). In some embodiments, combinations of penetration enhancers are used, for example, fatty acids/salts in combination with bile acids/salts. One exemplary combination is the sodium salt of lauric acid, capric acid and UDCA. Further penetration enhancers include polyoxyethylene-9-lauryl ether, polyoxyethylene-20-cetyl ether. DsRNAs featured in the invention may be delivered orally, in granular form including sprayed dried particles, or complexed to form micro or nanoparticles. DsRNA complexing agents include poly-amino acids; polyimines; polyacrylates; polyalkylacrylates, polyoxethanes, polyalkylcyanoacrylates; cationized gelatins, albumins, starches, acrylates, polyethyleneglycols (PEG) and starches; polyalkylcyanoacrylates; DEAE-derivatized polyimines, pollulans, celluloses and starches. Suitable complexing agents include chitosan, N-trimethylchitosan, poly-L-lysine, polyhistidine, polyornithine, polyspermines, protamine, polyvinylpyridine, polythiodiethylaminomethylethylene P(TDAE), polyaminostyrene (e.g., p-amino), poly(methylcyanoacrylate), poly(ethylcyanoacrylate), poly(butylcyanoacrylate), poly(isobutylcyanoacrylate), poly(isohexylcynaoacrylate), DEAE-methacrylate, DEAE-hexylacrylate, DEAE-acrylamide, DEAE-albumin and DEAE-dextran, polymethylacrylate, polyhexylacrylate, poly(D,L-lactic acid), poly(DL-lactic-co-glycolic acid (PLGA), alginate, and polyethyleneglycol (PEG). Oral formulations for dsRNAs and their preparation are described in detail in U.S. Pat. No. 6,887,906, US Publn. No. 20030027780, and U.S. Pat. No. 6,747,014, each of which is incorporated herein by reference.

[0647] Compositions and formulations for parenteral, intraparenchymal (into the brain), intrathecal, intraventricular or intrahepatic administration may include sterile aqueous solutions which may also contain buffers, diluents and other suitable additives such as, but not limited to, penetration enhancers, carrier compounds and other pharmaceutically acceptable carriers or excipients.

[0648] Pharmaceutical compositions of the present invention include, but are not limited to, solutions, emulsions, and liposome-containing formulations. These compositions may be generated from a variety of components that include, but are not limited to, preformed liquids, self-emulsifying solids and self-emulsifying semisolids.

[0649] The pharmaceutical formulations featured in the present invention, which may conveniently be presented in unit dosage form, may be prepared according to conventional techniques well known in the pharmaceutical industry. Such techniques include the step of bringing into association the active ingredients with the pharmaceutical carrier(s) or excipient(s). In general, the formulations are prepared by uniformly and intimately bringing into association the active ingredients with liquid carriers or finely divided solid carriers or both, and then, if necessary, shaping the product.

[0650] The compositions featured in the present invention may be formulated into any of many possible dosage forms such as, but not limited to, tablets, capsules, gel capsules, liquid syrups, soft gels, suppositories, and enemas. The compositions may also be formulated as suspensions in aqueous, non-aqueous or mixed media. Aqueous suspensions may further contain substances which increase the viscosity of the suspension including, for example, sodium carboxymethylcellulose, sorbitol and/or dextran. The suspension may also contain stabilizers.

[0651] Additional Formulations

[0652] Emulsions

[0653] The compositions of the present invention may be prepared and formulated as emulsions. Emulsions are typically heterogeneous systems of one liquid dispersed in another in the form of droplets usually exceeding 0.1 μm in diameter (see e.g., Ansel's Pharmaceutical Dosage Forms and Drug Delivery Systems, Allen, L V., Popovich N G., and Ansel H C., 2004, Lippincott Williams & Wilkins (8th ed.), New York, N.Y.; Idson, in Pharmaceutical Dosage Forms, Lieberman, Rieger and Banker (Eds.), 1988, Marcel Dekker, Inc., New York, N.Y., volume 1, p. 199; Rosoff, in Pharmaceutical Dosage Forms, Lieberman, Rieger and Banker (Eds.), 1988, Marcel Dekker, Inc., New York, N.Y., Volume 1, p. 245; Block in Pharmaceutical Dosage Forms, Lieberman, Rieger and Banker (Eds.), 1988, Marcel Dekker, Inc., New York, N.Y., volume 2, p. 335; Higuchi et al., in Remington's Pharmaceutical Sciences, Mack Publishing Co., Easton, Pa., 1985, p. 301). Emulsions are often biphasic systems comprising two immiscible liquid phases intimately mixed and dispersed with each other. In general, emulsions may be of either the water-in-oil (w/o) or the oil-in-water (o/w) variety. When an aqueous phase is finely divided into and dispersed as minute droplets into a bulk oily phase, the resulting composition is called a water-in-oil (w/o) emulsion. Alternatively, when an oily phase is finely divided into and dispersed as minute droplets into a bulk aqueous phase, the resulting composition is called an oil-in-water (o/w) emulsion. Emulsions may contain additional components in addition to the dispersed phases, and the active drug which may be present as a solution in either the aqueous phase, oily phase or itself as a separate phase. Pharmaceutical excipients such as emulsifiers, stabilizers, dyes, and anti-oxidants may also be present in emulsions as needed. Pharmaceutical emulsions may also be multiple emulsions that are comprised of more than two phases such as, for example, in the case of oil-in-water-in-oil (o/w/o) and water-in-oil-in-water (w/o/w) emulsions. Such complex formulations often provide certain advantages that simple binary emulsions do not. Multiple emulsions in which individual oil droplets of an o/w emulsion enclose small water droplets constitute a w/o/w emulsion. Likewise a system of oil droplets enclosed in globules of water stabilized in an oily continuous phase provides an o/w/o emulsion.

[0654] Emulsions are characterized by little or no thermodynamic stability. Often, the dispersed or discontinuous phase of the emulsion is well dispersed into the external or continuous phase and maintained in this form through the means of emulsifiers or the viscosity of the formulation. Either of the phases of the emulsion may be a semisolid or a solid, as is the case of emulsion-style ointment bases and creams. Other means of stabilizing emulsions entail the use of emulsifiers that may be incorporated into either phase of the emulsion. Emulsifiers may broadly be classified into four categories: synthetic surfactants, naturally occurring emulsifiers, absorption bases, and finely dispersed solids (see e.g., Ansel's Pharmaceutical Dosage Forms and Drug Delivery Systems, Allen, L V., Popovich N G., and Ansel H C., 2004, Lippincott Williams & Wilkins (8th ed.), New York, N.Y.; Idson, in Pharmaceutical Dosage Forms, Lieberman, Rieger and Banker (Eds.), 1988, Marcel Dekker, Inc., New York, N.Y., volume 1, p. 199).

[0655] Synthetic surfactants, also known as surface active agents, have found wide applicability in the formulation of emulsions and have been reviewed in the literature (see e.g., Ansel's Pharmaceutical Dosage Forms and Drug Delivery Systems, Allen, L V., Popovich N G., and Ansel H C., 2004, Lippincott Williams & Wilkins (8th ed.), New York, N.Y.; Rieger, in Pharmaceutical Dosage Forms, Lieberman, Rieger and Banker (Eds.), 1988, Marcel Dekker, Inc., New York, N.Y., volume 1, p. 285; Idson, in Pharmaceutical Dosage Forms, Lieberman, Rieger and Banker (Eds.), Marcel Dekker, Inc., New York, N.Y., 1988, volume 1, p. 199). Surfactants are typically amphiphilic and comprise a hydrophilic and a hydrophobic portion. The ratio of the hydrophilic to the hydrophobic nature of the surfactant has been termed the hydrophile/lipophile balance (HLB) and is a valuable tool in categorizing and selecting surfactants in the preparation of formulations. Surfactants may be classified into different classes based on the nature of the hydrophilic group: nonionic, anionic, cationic and amphoteric (see e.g., Ansel's Pharmaceutical Dosage Forms and Drug Delivery Systems, Allen, L V., Popovich N G., and Ansel H C., 2004, Lippincott Williams & Wilkins (8th ed.), New York, N.Y. Rieger, in Pharmaceutical Dosage Forms, Lieberman, Rieger and Banker (Eds.), 1988, Marcel Dekker, Inc., New York, N.Y., volume 1, p. 285).

[0656] Naturally occurring emulsifiers used in emulsion formulations include lanolin, beeswax, phosphatides, lecithin and acacia. Absorption bases possess hydrophilic properties such that they can soak up water to form w/o emulsions yet retain their semisolid consistencies, such as anhydrous lanolin and hydrophilic petrolatum Finely divided solids have also been used as good emulsifiers especially in combination with surfactants and in viscous preparations. These include polar inorganic solids, such as heavy metal hydroxides, nonswelling clays such as bentonite, attapulgite, hectorite, kaolin, montmorillonite, colloidal aluminum silicate and colloidal magnesium aluminum silicate, pigments and nonpolar solids such as carbon or glyceryl tristearate.

[0657] A large variety of non-emulsifying materials are also included in emulsion formulations and contribute to the properties of emulsions. These include fats, oils, waxes, fatty acids, fatty alcohols, fatty esters, humectants, hydrophilic colloids, preservatives and antioxidants (Block, in Pharmaceutical Dosage Forms, Lieberman, Rieger and Banker (Eds.), 1988, Marcel Dekker, Inc., New York, N.Y., volume 1, p. 335; Idson, in Pharmaceutical Dosage Forms, Lieberman, Rieger and Banker (Eds.), 1988, Marcel Dekker, Inc., New York, N.Y., volume 1, p. 199).

[0658] Hydrophilic colloids or hydrocolloids include naturally occurring gums and synthetic polymers such as polysaccharides (for example, acacia, agar, alginic acid, carrageenan, guar gum, karaya gum, and tragacanth), cellulose derivatives (for example, carboxymethylcellulose and carboxypropylcellulose), and synthetic polymers (for example, carbomers, cellulose ethers, and carboxyvinyl polymers). These disperse or swell in water to form colloidal solutions that stabilize emulsions by forming strong interfacial films around the dispersed-phase droplets and by increasing the viscosity of the external phase.

[0659] Since emulsions often contain a number of ingredients such as carbohydrates, proteins, sterols and phosphatides that may readily support the growth of microbes, these formulations often incorporate preservatives. Commonly used preservatives included in emulsion formulations include methyl paraben, propyl paraben, quaternary ammonium salts, benzalkonium chloride, esters of p-hydroxybenzoic acid, and boric acid. Antioxidants are also commonly added to emulsion formulations to prevent deterioration of the formulation. Antioxidants used may be free radical scavengers such as tocopherols, alkyl gallates, butylated hydroxyanisole, butylated hydroxytoluene, or reducing agents such as ascorbic acid and sodium metabisulfite, and antioxidant synergists such as citric acid, tartaric acid, and lecithin.

[0660] The application of emulsion formulations via dermatological, oral and parenteral routes and methods for their manufacture have been reviewed in the literature (see e.g., Ansel's Pharmaceutical Dosage Forms and Drug Delivery Systems, Allen, L V., Popovich N G., and Ansel H C., 2004, Lippincott Williams & Wilkins (8th ed.), New York, N.Y.; Idson, in Pharmaceutical Dosage Forms, Lieberman, Rieger and Banker (Eds.), 1988, Marcel Dekker, Inc., New York, N.Y., volume 1, p. 199). Emulsion formulations for oral delivery have been very widely used because of ease of formulation, as well as efficacy from an absorption and bioavailability standpoint (see e.g., Ansel's Pharmaceutical Dosage Forms and Drug Delivery Systems, Allen, L V., Popovich N G., and Ansel H C., 2004, Lippincott Williams & Wilkins (8th ed.), New York, N.Y.; Rosoff, in Pharmaceutical Dosage Forms, Lieberman, Rieger and Banker (Eds.), 1988, Marcel Dekker, Inc., New York, N.Y., volume 1, p. 245; Idson, in Pharmaceutical Dosage Forms, Lieberman, Rieger and Banker (Eds.), 1988, Marcel Dekker, Inc., New York, N.Y., volume 1, p. 199). Mineral-oil base laxatives, oil-soluble vitamins and high fat nutritive preparations are among the materials that have commonly been administered orally as o/w emulsions.

[0661] In one embodiment of the present invention, the compositions of iRNAs and nucleic acids are formulated as microemulsions. A microemulsion may be defined as a system of water, oil and amphiphile which is a single optically isotropic and thermodynamically stable liquid solution (see e.g., Ansel's Pharmaceutical Dosage Forms and Drug Delivery Systems, Allen, L V., Popovich N G., and Ansel H C., 2004, Lippincott Williams & Wilkins (8th ed.), New York, N.Y.; Rosoff, in Pharmaceutical Dosage Forms, Lieberman, Rieger and Banker (Eds.), 1988, Marcel Dekker, Inc., New York, N.Y., volume 1, p. 245). Typically microemulsions are systems that are prepared by first dispersing an oil in an aqueous surfactant solution and then adding a sufficient amount of a fourth component, generally an intermediate chain-length alcohol to form a transparent system. Therefore, microemulsions have also been described as thermodynamically stable, isotropically clear dispersions of two immiscible liquids that are stabilized by interfacial films of surface-active molecules (Leung and Shah, in: Controlled Release of Drugs: Polymers and Aggregate Systems, Rosoff, M., Ed., 1989, VCH Publishers, New York, pages 185-215). Microemulsions commonly are prepared via a combination of three to five components that include oil, water, surfactant, cosurfactant and electrolyte. Whether the microemulsion is of the water-in-oil (w/o) or an oil-in-water (o/w) type is dependent on the properties of the oil and surfactant used and on the structure and geometric packing of the polar heads and hydrocarbon tails of the surfactant molecules (Schott, in Remington's Pharmaceutical Sciences, Mack Publishing Co., Easton, Pa., 1985, p. 271).

[0662] The phenomenological approach utilizing phase diagrams has been extensively studied and has yielded a comprehensive knowledge, to one skilled in the art, of how to formulate microemulsions (see e.g., Ansel's Pharmaceutical Dosage Forms and Drug Delivery Systems, Allen, L V., Popovich N G., and Ansel H C., 2004, Lippincott Williams & Wilkins (8th ed.), New York, N.Y.; Rosoff, in Pharmaceutical Dosage Forms, Lieberman, Rieger and Banker (Eds.), 1988, Marcel Dekker, Inc., New York, N.Y., volume 1, p. 245; Block, in Pharmaceutical Dosage Forms, Lieberman, Rieger and Banker (Eds.), 1988, Marcel Dekker, Inc., New York, N.Y., volume 1, p. 335). Compared to conventional emulsions, microemulsions offer the advantage of solubilizing water-insoluble drugs in a formulation of thermodynamically stable droplets that are formed spontaneously.

[0663] Surfactants used in the preparation of microemulsions include, but are not limited to, ionic surfactants, non-ionic surfactants, Brij 96, polyoxyethylene oleyl ethers, polyglycerol fatty acid esters, tetraglycerol monolaurate (ML310), tetraglycerol monooleate (MO310), hexaglycerol monooleate (PO310), hexaglycerol pentaoleate (PO500), decaglycerol monocaprate (MCA750), decaglycerol monooleate (MO750), decaglycerol sequioleate (SO750), decaglycerol decaoleate (DAO750), alone or in combination with cosurfactants. The cosurfactant, usually a short-chain alcohol such as ethanol, 1-propanol, and 1-butanol, serves to increase the interfacial fluidity by penetrating into the surfactant film and consequently creating a disordered film because of the void space generated among surfactant molecules. Microemulsions may, however, be prepared without the use of cosurfactants and alcohol-free self-emulsifying microemulsion systems are known in the art. The aqueous phase may typically be, but is not limited to, water, an aqueous solution of the drug, glycerol, PEG300, PEG400, polyglycerols, propylene glycols, and derivatives of ethylene glycol. The oil phase may include, but is not limited to, materials such as Captex 300, Captex 355, Capmul MCM, fatty acid esters, medium chain (C8-C12) mono, di, and tri-glycerides, polyoxyethylated glyceryl fatty acid esters, fatty alcohols, polyglycolized glycerides, saturated polyglycolized C8-C10 glycerides, vegetable oils and silicone oil.

[0664] Microemulsions are particularly of interest from the standpoint of drug solubilization and the enhanced absorption of drugs. Lipid based microemulsions (both o/w and w/o) have been proposed to enhance the oral bioavailability of drugs, including peptides (see e.g., U.S. Pat. Nos. 6,191,105; 7,063,860; 7,070,802; 7,157,099; Constantinides et al., Pharmaceutical Research, 1994, 11, 1385-1390; Ritschel, Meth. Find. Exp. Clin. Pharmacol., 1993, 13, 205). Microemulsions afford advantages of improved drug solubilization, protection of drug from enzymatic hydrolysis, possible enhancement of drug absorption due to surfactant-induced alterations in membrane fluidity and permeability, ease of preparation, ease of oral administration over solid dosage forms, improved clinical potency, and decreased toxicity (see e.g., U.S. Pat. Nos. 6,191,105; 7,063,860; 7,070,802; 7,157,099; Constantinides et al., Pharmaceutical Research, 1994, 11, 1385; Ho et al., J. Pharm. Sci., 1996, 85, 138-143). Often microemulsions may form spontaneously when their components are brought together at ambient temperature. This may be particularly advantageous when formulating thermolabile drugs, peptides or iRNAs. Microemulsions have also been effective in the transdermal delivery of active components in both cosmetic and pharmaceutical applications. It is expected that the microemulsion compositions and formulations of the present invention will facilitate the increased systemic absorption of iRNAs and nucleic acids from the gastrointestinal tract, as well as improve the local cellular uptake of iRNAs and nucleic acids.

[0665] Microemulsions of the present invention may also contain additional components and additives such as sorbitan monostearate (Grill 3), Labrasol, and penetration enhancers to improve the properties of the formulation and to enhance the absorption of the iRNAs and nucleic acids of the present invention. Penetration enhancers used in the microemulsions of the present invention may be classified as belonging to one of five broad categories—surfactants, fatty acids, bile salts, chelating agents, and non-chelating non-surfactants (Lee et al., Critical Reviews in Therapeutic Drug Carrier Systems, 1991, p. 92). Each of these classes has been discussed above.

[0666] Penetration Enhancers

[0667] In one embodiment, the present invention employs various penetration enhancers to effect the efficient delivery of nucleic acids, particularly iRNAs, to the skin of animals. Most drugs are present in solution in both ionized and nonionized forms. However, usually only lipid soluble or lipophilic drugs readily cross cell membranes. It has been discovered that even non-lipophilic drugs may cross cell membranes if the membrane to be crossed is treated with a penetration enhancer. In addition to aiding the diffusion of non-lipophilic drugs across cell membranes, penetration enhancers also enhance the permeability of lipophilic drugs.

[0668] Penetration enhancers may be classified as belonging to one of five broad categories, i.e., surfactants, fatty acids, bile salts, chelating agents, and non-chelating non-surfactants (see e.g., Malmsten, M. Surfactants and polymers in drug delivery, Informa Health Care, New York, N.Y., 2002; Lee et al., Critical Reviews in Therapeutic Drug Carrier Systems, 1991, p. 92). Each of the above mentioned classes of penetration enhancers are described below in greater detail.

[0669] Surfactants: In connection with the present invention, surfactants (or “surface-active agents”) are chemical entities which, when dissolved in an aqueous solution, reduce the surface tension of the solution or the interfacial tension between the aqueous solution and another liquid, with the result that absorption of iRNAs through the mucosa is enhanced. In addition to bile salts and fatty acids, these penetration enhancers include, for example, sodium lauryl sulfate, polyoxyethylene-9-lauryl ether and polyoxyethylene-20-cetyl ether) (see e.g., Malmsten, M. Surfactants and polymers in drug delivery, Informa Health Care, New York, N.Y., 2002; Lee et al., Critical Reviews in Therapeutic Drug Carrier Systems, 1991, p. 92); and perfluorochemical emulsions, such as FC-43. Takahashi et al., J. Pharm. Pharmacol., 1988, 40, 252).

[0670] Fatty acids: Various fatty acids and their derivatives which act as penetration enhancers include, for example, oleic acid, lauric acid, capric acid (n-decanoic acid), myristic acid, palmitic acid, stearic acid, linoleic acid, linolenic acid, dicaprate, tricaprate, monoolein (1-monooleoyl-rac-glycerol), dilaurin, caprylic acid, arachidonic acid, glycerol 1-monocaprate, 1-dodecylazacycloheptan-2-one, acylcarnitines, acylcholines, C₁₋₂₀ alkyl esters thereof (e.g., methyl, isopropyl and t-butyl), and mono- and di-glycerides thereof (i.e., oleate, laurate, caprate, myristate, palmitate, stearate, linoleate, etc.) (see e.g., Touitou, E., et al. Enhancement in Drug Delivery, CRC Press, Danvers, Mass., 2006; Lee et al., Critical Reviews in Therapeutic Drug Carrier Systems, 1991, p. 92; Muranishi, Critical Reviews in Therapeutic Drug Carrier Systems, 1990, 7, 1-33; El Hariri et al., J. Pharm. Pharmacol., 1992, 44, 651-654).

[0671] Bile salts: The physiological role of bile includes the facilitation of dispersion and absorption of lipids and fat-soluble vitamins (see e.g., Malmsten, M. Surfactants and polymers in drug delivery, Informa Health Care, New York, N.Y., 2002; Brunton, Chapter 38 in: Goodman & Gilman's The Pharmacological Basis of Therapeutics, 9th Ed., Hardman et al. Eds., McGraw-Hill, New York, 1996, pp. 934-935). Various natural bile salts, and their synthetic derivatives, act as penetration enhancers. Thus the term “bile salts” includes any of the naturally occurring components of bile as well as any of their synthetic derivatives. Suitable bile salts include, for example, cholic acid (or its pharmaceutically acceptable sodium salt, sodium cholate), dehydrocholic acid (sodium dehydrocholate), deoxycholic acid (sodium deoxycholate), glucholic acid (sodium glucholate), glycholic acid (sodium glycocholate), glycodeoxycholic acid (sodium glycodeoxycholate), taurocholic acid (sodium taurocholate), taurodeoxycholic acid (sodium taurodeoxycholate), chenodeoxycholic acid (sodium chenodeoxycholate), ursodeoxycholic acid (UDCA), sodium tauro-24,25-dihydro-fusidate (STDHF), sodium glycodihydrofusidate and polyoxyethylene-9-lauryl ether (POE) (see e.g., Malmsten, M. Surfactants and polymers in drug delivery, Informa Health Care, New York, N.Y., 2002; Lee et al., Critical Reviews in Therapeutic Drug Carrier Systems, 1991, page 92; Swinyard, Chapter 39 In: Remington's Pharmaceutical Sciences, 18th Ed., Gennaro, ed., Mack Publishing Co., Easton, Pa., 1990, pages 782-783; Muranishi, Critical Reviews in Therapeutic Drug Carrier Systems, 1990, 7, 1-33; Yamamoto et al., J. Pharm. Exp. Ther., 1992, 263, 25; Yamashita et al., J. Pharm. Sci., 1990, 79, 579-583).

[0672] Chelating Agents: Chelating agents, as used in connection with the present invention, can be defined as compounds that remove metallic ions from solution by forming complexes therewith, with the result that absorption of iRNAs through the mucosa is enhanced. With regards to their use as penetration enhancers in the present invention, chelating agents have the added advantage of also serving as DNase inhibitors, as most characterized DNA nucleases require a divalent metal ion for catalysis and are thus inhibited by chelating agents (Jarrett, J. Chromatogr., 1993, 618, 315-339). Suitable chelating agents include but are not limited to disodium ethylenediaminetetraacetate (EDTA), citric acid, salicylates (e.g., sodium salicylate, 5-methoxysalicylate and homovanilate), N-acyl derivatives of collagen, laureth-9 and N-amino acyl derivatives of β-diketones (enamines)(see e.g., Katdare, A. et al., Excipient development for pharmaceutical, biotechnology, and drug delivery, CRC Press, Danvers, Mass., 2006; Lee et al., Critical Reviews in Therapeutic Drug Carrier Systems, 1991, page 92; Muranishi, Critical Reviews in Therapeutic Drug Carrier Systems, 1990, 7, 1-33; Buur et al., J. Control Rel., 1990, 14, 43-51).

[0673] Non-chelating non-surfactants: As used herein, non-chelating non-surfactant penetration enhancing compounds can be defined as compounds that demonstrate insignificant activity as chelating agents or as surfactants but that nonetheless enhance absorption of iRNAs through the alimentary mucosa (see e.g., Muranishi, Critical Reviews in Therapeutic Drug Carrier Systems, 1990, 7, 1-33). This class of penetration enhancers include, for example, unsaturated cyclic ureas, 1-alkyl- and 1-alkenylazacyclo-alkanone derivatives (Lee et al., Critical Reviews in Therapeutic Drug Carrier Systems, 1991, page 92); and non-steroidal anti-inflammatory agents such as diclofenac sodium, indomethacin and phenylbutazone (Yamashita et al., J. Pharm. Pharmacol., 1987, 39, 621-626).

[0674] Agents that enhance uptake of iRNAs at the cellular level may also be added to the pharmaceutical and other compositions of the present invention. For example, cationic lipids, such as lipofectin (Junichi et al, U.S. Pat. No. 5,705,188), cationic glycerol derivatives, and polycationic molecules, such as polylysine (Lollo et al., PCT Application WO 97/30731), are also known to enhance the cellular uptake of dsRNAs. Examples of commercially available transfection reagents include, for example Lipofectamine™ (Invitrogen; Carlsbad, Calif.), Lipofectamine 2000™ (Invitrogen; Carlsbad, Calif.), 293Fectin™ (Invitrogen; Carlsbad, Calif.), Cellfectin™ (Invitrogen; Carlsbad, Calif.), DMRIE-C™ (Invitrogen; Carlsbad, Calif.), FreeStyle™ MAX (Invitrogen; Carlsbad, Calif.), Lipofectamine™ 2000 CD (Invitrogen; Carlsbad, Calif.), Lipofectamine™ (Invitrogen; Carlsbad, Calif.), RNAiMAX (Invitrogen; Carlsbad, Calif.), Oligofectamine™ (Invitrogen; Carlsbad, Calif.), Optifect™ (Invitrogen; Carlsbad, Calif.), X-tremeGENE Q2 Transfection Reagent (Roche; Grenzacherstrasse, Switzerland), DOTAP Liposomal Transfection Reagent (Grenzacherstrasse, Switzerland), DOSPER Liposomal Transfection Reagent (Grenzacherstrasse, Switzerland), or Fugene (Grenzacherstrasse, Switzerland), Transfectam® Reagent (Promega; Madison, Wis.), TransFast™ Transfection Reagent (Promega; Madison, Wis.), Tfx™-20 Reagent (Promega; Madison, Wis.), Tfx™-50 Reagent (Promega; Madison, Wis.), DreamFect™ (OZ Biosciences; Marseille, France), EcoTransfect (OZ Biosciences; Marseille, France), TransPass^{a} D1 Transfection Reagent (New England Biolabs; Ipswich, Mass., USA), LyoVec™/LipoGen™ (Invivogen; San Diego, Calif., USA), PerFectin Transfection Reagent (Genlantis; San Diego, Calif., USA), NeuroPORTER Transfection Reagent (Genlantis; San Diego, Calif., USA), GenePORTER Transfection reagent (Genlantis; San Diego, Calif., USA), GenePORTER 2 Transfection reagent (Genlantis; San Diego, Calif., USA), Cytofectin Transfection Reagent (Genlantis; San Diego, Calif., USA), BaculoPORTER Transfection Reagent (Genlantis; San Diego, Calif., USA), TroganPORTER™ transfection Reagent (Genlantis; San Diego, Calif., USA), RiboFect (Bioline; Taunton, Mass., USA), PlasFect (Bioline; Taunton, Mass., USA), UniFECTOR (B-Bridge International; Mountain View, Calif., USA), SureFECTOR (B-Bridge International; Mountain View, Calif., USA), or HiFect™ (B-Bridge International, Mountain View, Calif., USA), among others.

[0675] Other agents may be utilized to enhance the penetration of the administered nucleic acids, including glycols such as ethylene glycol and propylene glycol, pyrrols such as 2-pyrrol, azones, and terpenes such as limonene and menthone.

[0676] Carriers

[0677] Certain compositions of the present invention also incorporate carrier compounds in the formulation. As used herein, “carrier compound” or “carrier” can refer to a nucleic acid, or analog thereof, which is inert (i.e., does not possess biological activity per se) but is recognized as a nucleic acid by in vivo processes that reduce the bioavailability of a nucleic acid having biological activity by, for example, degrading the biologically active nucleic acid or promoting its removal from circulation. The coadministration of a nucleic acid and a carrier compound, typically with an excess of the latter substance, can result in a substantial reduction of the amount of nucleic acid recovered in the liver, kidney or other extracirculatory reservoirs, presumably due to competition between the carrier compound and the nucleic acid for a common receptor. For example, the recovery of a partially phosphorothioate dsRNA in hepatic tissue can be reduced when it is coadministered with polyinosinic acid, dextran sulfate, polycytidic acid or 4-acetamido-4′isothiocyano-stilbene-2,2′-disulfonic acid (Miyao et al., DsRNA Res. Dev., 1995, 5, 115-121; Takakura et al., DsRNA & Nucl. Acid Drug Dev., 1996, 6, 177-183.

[0678] Excipients

[0679] In contrast to a carrier compound, a “pharmaceutical carrier” or “excipient” is a pharmaceutically acceptable solvent, suspending agent or any other pharmacologically inert vehicle for delivering one or more nucleic acids to an animal. The excipient may be liquid or solid and is selected, with the planned manner of administration in mind, so as to provide for the desired bulk, consistency, etc., when combined with a nucleic acid and the other components of a given pharmaceutical composition. Typical pharmaceutical carriers include, but are not limited to, binding agents (e.g., pregelatinized maize starch, polyvinylpyrrolidone or hydroxypropyl methylcellulose, etc.); fillers (e.g., lactose and other sugars, microcrystalline cellulose, pectin, gelatin, calcium sulfate, ethyl cellulose, polyacrylates or calcium hydrogen phosphate, etc.); lubricants (e.g., magnesium stearate, talc, silica, colloidal silicon dioxide, stearic acid, metallic stearates, hydrogenated vegetable oils, corn starch, polyethylene glycols, sodium benzoate, sodium acetate, etc.); disintegrants (e.g., starch, sodium starch glycolate, etc.); and wetting agents (e.g., sodium lauryl sulphate, etc).

[0680] Pharmaceutically acceptable organic or inorganic excipients suitable for non-parenteral administration which do not deleteriously react with nucleic acids can also be used to formulate the compositions of the present invention. Suitable pharmaceutically acceptable carriers include, but are not limited to, water, salt solutions, alcohols, polyethylene glycols, gelatin, lactose, amylose, magnesium stearate, talc, silicic acid, viscous paraffin, hydroxymethylcellulose, polyvinylpyrrolidone and the like.

[0681] Formulations for topical administration of nucleic acids may include sterile and non-sterile aqueous solutions, non-aqueous solutions in common solvents such as alcohols, or solutions of the nucleic acids in liquid or solid oil bases. The solutions may also contain buffers, diluents and other suitable additives. Pharmaceutically acceptable organic or inorganic excipients suitable for non-parenteral administration which do not deleteriously react with nucleic acids can be used.

[0682] Suitable pharmaceutically acceptable excipients include, but are not limited to, water, salt solutions, alcohol, polyethylene glycols, gelatin, lactose, amylose, magnesium stearate, talc, silicic acid, viscous paraffin, hydroxymethylcellulose, polyvinylpyrrolidone and the like.

[0683] Other Components

[0684] The compositions of the present invention may additionally contain other adjunct components conventionally found in pharmaceutical compositions, at their art-established usage levels. Thus, for example, the compositions may contain additional, compatible, pharmaceutically-active materials such as, for example, antipruritics, astringents, local anesthetics or anti-inflammatory agents, or may contain additional materials useful in physically formulating various dosage forms of the compositions of the present invention, such as dyes, flavoring agents, preservatives, antioxidants, opacifiers, thickening agents and stabilizers. However, such materials, when added, should not unduly interfere with the biological activities of the components of the compositions of the present invention. The formulations can be sterilized and, if desired, mixed with auxiliary agents, e.g., lubricants, preservatives, stabilizers, wetting agents, emulsifiers, salts for influencing osmotic pressure, buffers, colorings, flavorings and/or aromatic substances and the like which do not deleteriously interact with the nucleic acid(s) of the formulation.

[0685] Aqueous suspensions may contain substances that increase the viscosity of the suspension including, for example, sodium carboxymethylcellulose, sorbitol and/or dextran. The suspension may also contain stabilizers.

[0686] In some embodiments, pharmaceutical compositions featured in the invention include (a) one or more iRNA compounds and (b) one or more biologic agents which function by a non-RNAi mechanism. Examples of such biologic agents include agents that interfere with an interaction of ALAS1 and at least one ALAS1 binding partner.

[0687] Toxicity and therapeutic efficacy of such compounds can be determined by standard pharmaceutical procedures in cell cultures or experimental animals, e.g., for determining the LD50 (the dose lethal to 50% of the population) and the ED50 (the dose therapeutically effective in 50% of the population). The dose ratio between toxic and therapeutic effects is the therapeutic index and it can be expressed as the ratio LD50/ED50. Compounds that exhibit high therapeutic indices are typical.

[0688] The data obtained from cell culture assays and animal studies can be used in formulating a range of dosage for use in humans. The dosage of compositions featured in the invention lies generally within a range of circulating concentrations that include the ED50 with little or no toxicity. The dosage may vary within this range depending upon the dosage form employed and the route of administration utilized. For any compound used in the methods featured in the invention, the therapeutically effective dose can be estimated initially from cell culture assays. A dose may be formulated in animal models to achieve a circulating plasma concentration range of the compound or, when appropriate, of the polypeptide product of a target sequence (e.g., achieving a decreased concentration of the polypeptide) that includes the IC50 (i.e., the concentration of the test compound which achieves a half-maximal inhibition of symptoms) as determined in cell culture. Such information can be used to more accurately determine useful doses in humans. Levels in plasma may be measured, for example, by high performance liquid chromatography.

[0689] In addition to their administration, as discussed above, the iRNAs featured in the invention can be administered in combination with other known agents effective in treatment of diseases or disorders related to ALAS1 expression. In any event, the administering physician can adjust the amount and timing of iRNA administration on the basis of results observed using standard measures of efficacy known in the art or described herein.

[0690] Methods for Treating Diseases Related to Expression of an ALAS1 Gene

[0691] The invention relates in particular to the use of an iRNA targeting ALAS1 to inhibit ALAS1 expression and/or to treat a disease, disorder, or pathological process that is related to ALAS1 expression.

[0692] As used herein, “a disorder related to ALAS1 expression,” a “disease related to ALAS1 expression, a “pathological process related to ALAS1 expression,” or the like includes any condition, disorder, or disease in which ALAS1 expression is altered (e.g., elevated), the level of one or more porphyrins is altered (e.g., elevated), the level or activity of one or more enzymes in the heme biosynthetic pathway (porphyrin pathway) is altered, or other mechisms that lead to pathological changes in the heme biosynthetic pathway. For example, an iRNA targeting an ALAS1 gene, or a combination thereof, may be used for treatment of conditions in which levels of a porphyrin or a porphyrin precursor (e.g., ALA or PBG) are elevated (e.g., certain porphyrias), or conditions in which there are defects in the enzymes of the heme biosynthetic pathway (e.g., certain porphyrias). Disorders related to ALAS1 expression include, for example, X-linked sideroblastic anemia (XLSA), ALA deyhdratase deficiency porphyria (Doss porphyria), acute intermittent porphyria (AIP), congenital erythropoietic porphyria, prophyria cutanea tarda, hereditary coproporphyria (coproporphyria), variegate porphyria, erythropoietic protoporphyria (EPP), and transient erythroporphyria of infancy.

[0693] As used herein, a “subject” to be treated according to the methods described herein, includes a human or non-human animal, e.g., a mammal. The mammal may be, for example, a rodent (e.g., a rat or mouse) or a primate (e.g., a monkey). In some embodiments, the subject is a human.

[0694] In some embodiments, the subject is suffering from a disorder related to ALAS1 expression (e.g., has been diagnosed with a porphyria or has suffered from one or more symptoms of porphyria and is a carrier of a mutation associated with porphyria) or is at risk of developing a disorder related to ALAS1 expression (e.g., a subject with a family history of porphyria, or a subject who is a carrier of a genetic mutation associated with porphyria).

[0695] Classifications of porphyrias, including acute hepatic porphyrias, are described, e.g., in Balwani, M. & Desnick, R. J., Blood, 120(23), published online as Blood First Edition paper, July 12, 102; DOI 10.1182/blood-2012-05-423186. As described in Balwain & Desnick, acute intermittent porphyria (AIP) hereditary coproporphyria (HCP), variegate porphyria (VP) are autosomal dominant porphyrias and ALA deyhdratase deficiency porphyria (ADP) is autosomal recessive. In rare cases, AIP, HCP, and VP occur as homozygous dominant forms. In addition, there is a rare homozygous recessive form of porphyria cutanea tarda (PCT), which is the single hepatic cutaneous porphyria, and is also known as hepatoerythropoietic porphyria. The clinical and laboratory features of these porphyrias are described in Table 11 below.

TABLE 11
Human hepatic porphyrias: clinical and laboratory features

| | | | | Enzyme | | | |
|---|---|---|---|---|---|---|---|
| | | | Principal | activity, | Increased porphyrin precursors | | |
| | Deficient | | symptoms, | % of | and/or porphyrins* | | |
| Porphyria | enzyme | Inheritance | NV or CP | normal | Erythrocytes | Urine | Stool |

Acute hepatic porphyrias

| | | | | | | | |
|---|---|---|---|---|---|---|---|
| ADP | ALA- | AR | NV | ~5 | Zn- | ALA, | — |
| | dehydratase | | | | protoporphyrin | coproporphyrin | |
| | | | | | | III | |
| AIP | HMB- | AD | NV | ~50 | — | ALA, PBG, | — |
| | synthase | | | | | uroporphyrin | |
| HCP | COPRO- | AD | NV and CP | ~50 | — | ALA, PBG, | coproporphyrin |
| | oxidase | | | | | coproporphyrin | III |
| | | | | | | III | |
| VP | PROTO- | AD | NV and CP | ~50 | — | ALA, PBG | coproporphyrin |
| | oxidase | | | | | coproporphyrin | III, |
| | | | | | | III | protoporphyrin |

Hepatic cutaneous porphyrias

| | | | | | | | |
|---|---|---|---|---|---|---|---|
| PCT | URO- | Sporadic or | CP | <20 | — | uroporphyrin, | uroporphyrin, |
| | decarboxylase | AD | | | | 7-carboxylate | 7-carboxylate |
| | | | | | | porphyrin | porphyrin |

AR indicates autosomal recessive;
AD, autosomal dominant;
NV, neurovisceral;
CP cutaneous photosensitivity and
—, not applicable.
*Increases that may be important for diagnosis.

[0696] In some embodiments, the subject has or is at risk for developing a porphyria, e.g., a hepatic porphyria, e.g., AIP, HCP, VP, ADP, or hepatoerythropoietic porphyria.

[0697] In some embodiments, the porphyria is an acute hepatic porphyria, e.g., an acute hepatic porphyria iselected from acute intermittent porphyria (AIP), hereditary coproporphyria (HCP), variegate porphyria (VP), and ALA deyhdratase deficiency porphyria (ADP).

[0698] In some embodiments, the porphyria is a dual porphyria, e.g., at least two porphyrias. In some embodiments, the dual porphyria comprises two or more porphyrias selected from acute intermittent porphyria (AIP) hereditary coproporphyria (HCP), variegate porphyria (VP), and ALA deyhdratase deficiency porphyria (ADP).

[0699] In some embodiments, the porphyria is a homozygous dominant hepatic porphyria (e.g., homozygous dominant AIP, HCP, or VP) or hepatoerythropoietic porphyria, In some embodiments, the porphyria is AIP, HCP, VP, or hepatoerythropoietic porphyria, or a combination thereof (e.g., a dual porphyria). In embodiments, the AIP, HCP, or VP is either heterozygous dominant or homozygous dominant.

[0700] In embodiments, the subject has or is at risk for developing a porphyria, e.g., ADP, and shows an elevated level (e.g., an elevated urine level) of ALA and/or coproporphyrin III. In embodiments, the subject has or is at risk for developing a porphyria, e.g., ADP, and shows an elevated level of erythrocyte Zn-protoporphyrin.

[0701] In embodiments, the subject has or is at risk for developing a porphyria, e.g., AIP, and shows an elevated level (e.g., an elevated urine level) of ALA, PBG, and/or uroporphyrin.

[0702] In embodiments, the subject has or is at risk for developing a porphyria, e.g., HCP, and shows an elevated level (e.g., an elevated urine level) of ALA, PBG, and/or coproporphyrin III.

[0703] In embodiments, the subject has or is at risk for developing a porphyria, e.g., HCP, and shows an elevated level (e.g., an elevated stool level) of coproporphyrin III.

[0704] In embodiments, the subject has or is at risk for developing a porphyria, e.g., VP, and shows an elevated level (e.g., an elevated urine level) of ALA, PBG, and/or coproporphyrin III.

[0705] In embodiments, the subject has or is at risk for developing a porphyria, e.g., HCP, and shows an elevated level (e.g., an elevated stool level) of coproporphyrin III and/or protoporphyrin.

[0706] In embodiments, the subject has or is at risk for developing a porphyria, e.g., PCT, (e.g., hepatoerythropoietic porphyria) and shows an elevated level (e.g., an elevated urine level) of uroporphyrin and/or 7-carboxylate porphyrin. In embodiments, the subject has or is at risk for developing a porphyria, e.g., PCT, (e.g., hepatoerythropoietic porphyria) and shows an elevated level (e.g., an elevated stool level) of uroporphyrin and/or 7-carboxylate porphyrin.

[0707] A mutation associated with porphyria includes any mutation in a gene encoding an enzyme in the heme biosynthetic pathway (porphyrin pathway) or a gene which alters the expression of a gene in the heme biosynthetic pathway. In many embodiments, the subject carries one or more mutations in an enzyme of the porphyrin pathway (e.g., a mutation in ALA deydratase or PBG deaminase). In some embodiments, the subject is suffereing from an acute porphyria (e.g., AIP, ALA deydratase deficiency porphyria).

[0708] In some cases, patients with an acute hepatic porphyria (e.g., AIP), or patients who carry mutations associated with an acute hepatic porphyria (e.g., AIP) but who are asymptomatic, have elevated ALA and/or PBG levels compared with healthy individuals. See, e.g., Floderus, Y. et al, Clinical Chemistry, 52(4): 701-707, 2006; Sardh et al., Clinical Pharmacokinetics, 46(4): 335-349, 2007. In such cases, the level of ALA and/or PBG can be elevated even when the patient is not having, or has never had, an attack. In some such cases, the patient is otherwise completely asymptomatic. In some such cases, the patient suffers from pain, e.g., neuropathic pain, which can be chronic pain (e.g., chronic neuropathic pain). In some cases, the patient has a neuropathy. In some cases, the patient has a progressive neuropathy.

[0709] In some embodiments, the subject to be treated according to the methods described herein has an elevated level of a porphyrin or a porphyrin precursor, e.g., ALA and/or PBG. Levels of a porphyrin or a porphyrin precursor can be assessed using methods known in the art or methods described herein. For example, methods of assessing uring and plasma ALA and PBG levels, as well as urine and plasma porphyrin levels, are disclosed in Floderus, Y. et al, Clinical Chemistry, 52(4): 701-707, 2006; and Sardh et al., Clinical Pharmacokinetics, 46(4): 335-349, 2007, the entire contents of which are hereby incorporated in their entirety.

[0710] In some embodiments, the subject is an animal model of a porphyria, e.g., a mouse model of a porphyria (e.g., a mutant mouse as described in Lindberg et al. Nature Genetics, 12: 195-199, 1996). In some embodiments, the subject is a human, e.g., a human who has or is at risk for developing a porphyria, as described herein. In some embodiments, the subject is not having an acute attack of porphyria. In some embodiments, the subject has never had an attack. In some embodiments, the patient suffers from chronic pain. In some embodiments, the patient has nerve damage. In embodiments, the subject has EMG changes and/or changes in nerve conduction velocity. In some embodiments, the subject is asymptomatic. In some embodiments, the subject is at risk for developing a porphyria (e.g., carries a gene mutation associated with a porphyria) and is asymptomatic. In some embodiments, the subject has previously had an acute attack but is asymptomatic at the time of treatment.

[0711] In some embodiments, the subject is at risk for developing a porphyria and is treated prophylactically to prevent the development of a porphyria. In some embodiments the subject has an elevated level of a porphyrin or a porphyrin precursor, e.g., ALA and/or PBG. In some embodiments, the prophylactic treatment begins at puberty. In some embodiments the treatment lowers the level (e.g., the plasma level or the urine level) of a porphyrin or a porphyrin precursor, e.g., ALA and/or PBG. In some embodiments, the treatment prevents the development of an elevated level of a porphyrin or a porphyrin precursor, e.g., ALA and/or PBG. In some embodiments, the treatment prevents the development of, or decreases the frequency or severity of, a symptom associated with a porphyria, e.g., pain or nerve damage.

[0712] In some embodiments, the level of a porphyrin or a porphyrin precursor, e.g., ALA or PBG, is elevated, e.g., in a sample of plasma or urine from the subject. In some embodiments, the level of a porphyrin or a porphyrin precursor, e.g., ALA or PBG, in the subject is assessed based on the absolute level of the porphyrin or the porphyrin precursor, e.g., ALA or PBG in a sample from the subject. In some embodiments, the level of a porphyrin or a porphyrin precursor, e.g., ALA or PBG, in the subject is assessed based on the relative level of the porphyrin or porphyrin precursor, e.g., ALA or PBG, in a sample from the subject. In some embodiments, the relative level is relative to the level of another protein or compound, e.g., the level of creatinine, in a sample from the subject. In some embodiments, the sample is a urine sample. In some embodiments, the sample is a plasma sample. In some embodiments, the sample is a stool sample.

[0713] An elevated level of a porphyrin or a porphyrin precursor, e.g., ALA and/or PBG, can be established, e.g., by showing that the subject has a level of a porphyrin or a porphyrin precursor, e.g., ALA and/or PBG (e.g., a plasma or urine level of ALA and/or PBG) that is greater than, or greater than or equal to, a reference value. A physician with expertise in the treatment of porphyrias would be able to determine whether the level of a porphyrin or a porphyrin precursor, (e.g., ALA and/or PBG) is elevated, e.g., for the purpose of diagnosing a porphyria or for determining whether a subject is at risk for developing a porphyria, e.g., a subject may be predisposed to an acute attack or to pathology associated with a porphyria, such as, e.g., chronic pain (e.g., neuropathic pain) and neuropathy (e.g., progressive neuropathy).

[0714] As used herein, a “reference value” refers to a value from the subject when the subject is not in a disease state, or a value from a normal or healthy subject, or a value from a reference sample or population, e.g., a group of normal or healthy subjects (e.g., a group of subjects that does not carry a mutation associated with a porphyria and/or a group of subjects that does not suffer from symptoms associated with a porphyria).

[0715] In some embodiments, the reference value is a pre-disease level in the same individual. In some embodiments, the reference value is a level in a reference sample or population. In some embodiments, the reference value is the mean or median value in a reference sample or population. In some embodiments, the reference value the value that is is two standard deviations above the mean in a reference sample or population. In some embodiments, the reference value is the value that is 2.5, 3, 3.5, 4, 4.5, or 5 standard deviations above the mean in a reference sample or population.

[0716] In some embodiments, wherein the subject has an elevated level of a porphyrin or a porphyrin precursor, e.g., ALA and/or PBG, the subject has a level of ALA and/or PBG that is at least 10%, 20%, 30%, 40%, 50%, 60%, 70%, 80%, or 90% higher than a reference value. In some embodiments, the subject has a level of a porphyrin or a porphyrin precursor, e.g., ALA and/or PBG, that is at least 2, 3, 4, 5, 6, 7, 8, 9, or 10 fold higher than a reference value.

[0717] In some embodiments, the reference value is an upper reference limit. As used herein, an “upper reference limit” refers to a level that is the upper limit of the 95% confidence interval for a reference sample or population, e.g., a group of normal (e.g., wild type) or healthy individuals, e.g., individuals who do not carry a genetic mutation associated with a porphyria and/or individuals who do not suffer from a porphyria. Accordingly, a lower reference limit refers to a level that is the lower limit of the same 95% confidence interval.

[0718] In some embodiments wherein the subject has an elevated level, e.g., a plasma level or a urine level, of a porphyrin or a porphyrin precursor, e.g., ALA or PBG, the level is greater than or equal to 2 times, 3 times, 4 times, or 5 times that of a reference value, e.g., an upper reference limit. In some embodiments, the subject has a urine level of a porphyrin or a porphyrin precursor, e.g., ALA or PBG, that is greater than 4 times that of an upper reference limit.

[0719] In some embodiments, the reference value is a value provided in Floderus, Y. et al, Clinical Chemistry, 52(4): 701-707, 2006 or Sardh et al., Clinical Pharmacokinetics, 46(4): 335-349, 2007. In some embodiments, the reference value is a value provided in Table 1 of Sardh et al.

[0720] In some embodiments, the subject is a human and has a urine level of PBG that is greater than or equal to 4.8 mmol/mol creatinine. In certain embodiments, the subject is a human and has a urine level of PBG that is greater than, or greater than or equal to, about 3, 4, 5, 6, 7, or 8 mmol/mol creatinine.

[0721] In embodiments, the reference value for plasma PBG is 0.12 μmol/L. In embodiments, the subject is a human and has a plasma PBG level that is greater than, or greater than or equal to, 0.10 μmol/L, 0.12 μmol/L, 0.24 μmol/L, 0.36 μmol/L, 0.48 μmol/L, or 0.60 μmol/L. In embodiments, the subject is a human and has a plasma level of PBG that is greater than, or greater than or equal to, 0.48 μmol/L.

[0722] In embodiments, the reference value for urine PBG is 1.2 mmol/mol creatinine. In embodiments, the subject is a human and has a urine PBG level that is greater than, or greater than or equal to, 1.0 mmol/mol creatinine, 1.2 mmol/mol creatinine, 2.4 mmol/mol creatinine, 3.6 mmol/mol creatinine, 4.8 mmol/mol creatinine, or 6.0 mmol/mol creatinine. In embodiments, the subject is a human and has a urine level of PBG that is greater than, or greater than or equal to, 4.8 mmol/mol creatinine.

[0723] In embodiments, the reference value for plasma ALA is 0.12 μmol/L. In embodiments, the subject is a human and has a plasma ALA level that is greater than, or greater than or equal to, 0.10 μmol/L, 0.12 μmol/L, 0.24 μmol/L, 0.36 μmol/L, 0.48 μmol/L, or 0.60 μmol/L. In embodiments, the subject is a human and has a plasma ALA level that is greater than, or greater than or equal to 0.48 μmol/L.

[0724] In embodiments, the reference value for urine ALA is 3.1 mmol/mol creatinine. In embodiments, the subject is a human and has a urine ALA level that is greater than, or greater than or equal to, 2.5 mmol/mol creatinine, 3.1 mmol/mol creatinine, 6.2 mmol/mol creatinine, 9.3 mmol/mol creatinine, 12.4 mmol/mol creatinine, or 15.5 mmol/mol creatinine.

[0725] In embodiments, the reference value for plasma porphyrin is 10 nmol/L. In embodiments, the subject is a human and has a plasma porphyrin level that is greater than, or greater than or equal to, 10 nmol/L. In embodiments, the subject is a human and has a plasma porphyrin level that is greater than, or greater than or equal to, 8, 10, 15, 20, 25, 30, 35, 40, 45, or 50 nmol/L. the subject is a human and has a plasma porphyrin level that is greater than, or greater than or equal to 40 nmol/L. In embodiments, the reference value for urine porphyrin is 25 μmol/mol creatinine. In embodiments, the subject is a human and has a urine porphyrin level that is greater than, or greater than or equal to, 25 μmol/mol creatinine. In embodiments, the subject is a human and has a urine porphyrin level that is greater than, or equal to, 20, 25, 30, 35, 40, 45, 50, 55, 60, 65, 70, 75, or 80 μmol/mol creatinine.

[0726] In some embodiments, the subject has a level, e.g., a plasma level or a urine level, of a porphyrin or a porphyrin precursor, e.g., ALA or PBG, that is greater than that of 99% of individuals in a sample of healthy individuals.

[0727] In some embodiments, the subject has a level, e.g., a plasma level or a urine level, of ALA or PBG that is greater than two standard deviations above the mean level in a sample of healthy individuals.

[0728] In some embodiments, the subject has a urine level of ALA that is 1.6 or more times that of the mean level in a normal subject (e.g., a subject that does not carry a mutation associated with a porphyria). In some embodiments, the subject has a plasma level of ALA that is 2 or 3 times that of the mean level in a normal subject. In some embodiments, the subject has a urine level of PBG that is four or more times that of the mean level in a normal subject. In some embodiments, the subject has a plasma level of PBG that is four or more times that of the mean level in a normal subject.

[0729] In some embodiments, the method is effective to decrease the level of a porphyrin or a porphyrin precursor, e.g., ALA and/or PBG. In embodiments, the method is effective to produce a predetermined reduction in the elevated level of the porphyrin or porphyrin precursor, e.g., ALA or PBG. In some embodiments, the predetermined reduction is a decrease of at least 10%, 20%, 30%, 40%, or 50%. In some embodiments, the predetermined reduction is a reduction that is effective to prevent or ameliorate symptoms, e.g., pain or recurring attacks.

[0730] In some embodiments, the predetermined reduction is a reduction that is at least 1, 2, 3, or more standard deviations, wherein the standard deviation is determined based on the values from a reference sample, e.g., a reference sample as described herein.

[0731] In some embodiments, the predetermined reduction is a reduction that brings the level of the porphyrin or porphyrin precursor to a level that is less than, or to a level that is less than or equal to, a reference value (e.g., a reference value as described herein).

[0732] In some embodiments, the subject to be treated according to the methods described suffers from pain, e.g., chronic pain. In some embodiments, the subject has or is at risk for developing a porphyria, e.g. an acute hepatic porphyria, e.g., AIP. In embodiments, the method is effective to treat the pain, e.g., by reducing the severity of the pain or curing the pain. In embodiments, the method is effective to decrease or prevent nerve damage.

[0733] In some embodiments, the subject to be treated according to the methods described herein (a) has an elevated level of ALA and/or PBG and (b) suffers from pain, e.g., chronic pain. In embodiments, the method is effective to decrease an elevated level of ALA and/or PBG and/or to treat the pain, e.g., by reducing the severity of the pain or curing the pain.

[0734] In some embodiments, the subject is an animal that serves as a model for a disorder related to ALAS1 expression.

[0735] In some embodiments the subject is an animal that serves as a model for porphyria (e.g., a genetically modified animal with one or more mutations. In some embodiments, the porphyria is AIP and the subject is an animal model of AIP. In one such embodiment, the subject is a genetically modified mouse that is deficient in porphobilinogen deaminase, such as, for example, the mouse described in Lindberg et al., Nature Genetics, 12:195-199, 1996, or the homozygous R167Q mouse described in Yasuda, M., Yu, C. Zhang, J., Clavero, S., Edelmann, W., Gan, L., Phillips, J. D., & Desnick, R. J. Acute intermittent porphyria: A severely affected knock-in mouse that mimics the human homozygous dominant phenotype. (Abstract of Presentation on Oct. 14, 2011 at the American Society of Human Genetics; Program No. 1308F; accessed online on Apr. 4, 2012 at ichg2011.org/cgi-bin/showdetail.pl?absno=21167); both of these references are hereby incorporated herein in their entirety. Several knock-in models for mutations causing homozygous dominant AIP in humans have been generated. The mutations employed include, e.g., R167Q, R173Q, and R173W in PBG deaminase. Viable homozygotes included the R167Q/R176Q and R167Q/R173Q, both of which exhibit constitutively elevated ALA and PBG levels analogous to the phenotype in human homozygous dominant AIP; in some embodiments, such a viable homozygous AIP mouse model is the subject.

[0736] In one embodiment, a subject to be treated according to the methods described herein, (e.g., a human subject or patient), is at risk of developing, or has been diagnosed, with a disorder related to ALAS1 expression, e.g. a porphyria. In some embodiments, the subject is a subject who has suffered one or more acute attacks of one or more porphyric symptoms. In other embodiments, the subject is a subject who has suffered chronically from one or more symptoms of porphyria (e.g., pain, e.g., neuropathic pain and or neuropathy, e.g., progressive neuropathy). In some embodiments, the subject carries a genetic alteration (e.g., a mutation) as described herein but is otherwise asymptomatic. In some embodiments, the subject has previously been treated with a heme product (e.g., hemin, heme arginate, or heme albumin), as described herein.

[0737] In some embodiments, a subject (e.g., a subject with a porphyria, such as, e.g., AIP) to be treated according to the methods described herein has recently experienced or is currently experiencing a prodrome. In some such embodiments, the subject is administered a combination treatment, e.g., an iRNA as described herein, and one or more additional treatments known to be effective against porphyria (e.g., glucose and/or a heme product such as hemin, as described herein) or its associated symptoms.

[0738] In one embodiment, an iRNA as described herein is administered in combination with glucose or dextrose. For example, 10-20% dextrose in normal saline may be provided intravenously. Typically, when glucose is administered, at least 300 g of 10% glucose is administered intravenously daily. The iRNA (e.g., an iRNA in an LNP formulation) may also be administered intravenously, as part of the same infusion that is used to administer the glucose or dextrose, or as a separate infusion that is administered before, concurrently, or after the administration of the glucose or dextrose. In some embodiments, the iRNA is administered via a different route of administration (e.g., subcutaneously). In yet another embodiment, the iRNA is administered in combination with total parenteral nutrition. The iRNA may be administered before, concurrent with, or after the administration of total parenteral nutrition.

[0739] In one embodiment, the iRNA is administered in combination with a heme product (e.g., hemin, heme arginate, or heme albumin) In a further embodiment, the iRNA is administered in combination with a heme product and glucose, a heme product and dextrose, or a heme product and total parenteral nutrition.

[0740] A “prodrome,” as used herein, includes any symptom that the individual subject has previously experienced immediately prior to developing an acute attack. Typical symptoms of a prodrome include, e.g., abdominal pain, nausea, headaches, psychological symptoms (e.g., anxiety), restlessness and/or insomnia. In some embodiments, the subject experiences pain (e.g., abdominal pain and/or a headache) during the prodrome. In some embodiments, the subject experiences nausea during the prodrome. In some embodiments, the subject experiences psychological symptoms (e.g., anxiety) during the prodrome. In some embodiments, the subject becomes restless and/or suffers from insomnia during the prodrome.

[0741] An acute “attack” of porphyria involves the onset of one or more symptoms of porphyria, typically in a patient who carries a mutation associated with porphyria (e.g., a mutation in a gene that encodes an enzyme in the porphyrin pathway).

[0742] In certain embodiments, administration of an ALAS1 iRNA results in a decrease in the level of one or more porphyrins or porphyrin precursors, as described herein (e.g., ALA and/or PBG). The decrease may be measured relative to any appropriate control or reference value. For example, the decrease in the level of one or more porphyrins or porphyrin precursors may be established in an individual subject, e.g., as a decrease of at least 5%, 10%, 15%, 20%, 25%, 30%, 35%, 40%, 45%, 50% or more compared with the level prior to treatment (e.g., immediately prior to treatment). A decrease in the level of a porphyrin precursor, a porphyrin, or or a porphyrin metabolite may be measured using any method known in the art. For example, the level of PBG and/or ALA in urine or plasma may be assessed, using the Watson-Schwartz test, ion exchange chromatography, or high-performance liquid chromatography-mass spectrometry. See, e.g., Thunell (1993).

[0743] In some embodiments, administration of an ALAS1 siRNA is effective to reduce the level of ALA and/or PBG in the subject. The level of ALA or PBG in the subject can be assessed, e.g., based on the absolute level of ALA or PBG, or based on the relative level of ALA or PBG (e.g., relative to the level of another protein or compound, e.g., the level of creatinine) in a sample from the subject. In some embodiments, the sample is a urine sample. In some embodiments, the sample is a plasma sample.

[0744] In certain embodiments, an iRNA that targets ALAS1 is administered in combination one or more additional treatments, e.g., another treatment known to be effective in treating porphyria or symptoms of porphyria. For example, the other treatment may be glucose (e.g., IV glucose) or a heme product (e.g., hemin, heme arginate, or heme albumin) The additional treatment(s) may be administered before, after, or concurrent with the administration of iRNA.

[0745] The iRNA and an additional therapeutic agent can be administered in combination in the same composition, e.g., intravenously, or the additional therapeutic agent can be administered as part of a separate composition or by another method described herein.

[0746] In some embodiments, administration of iRNA, or administration of iRNA in combination one or more additional treatments (e.g., glucose, dextrose or the like), decreases the frequency of acute attacks (e.g., by preventing acute attacks so that they no longer occur, or by reducing the number of attacks that occur in a certain time period, e.g., fewer attacks occur per year). In some such embodiments, the iRNA is administered according to a regular dosing regimen, e.g., daily, weekly, biweekly, or monthly.

[0747] In some embodiments, the iRNA is administered after an acute attack of porphyria. In some such embodiments, the iRNA is in a composition, e.g. a composition comprising a lipid formulation, e.g. an LNP formulation.

[0748] In some embodiments, the iRNA is administered during an acute attack of porphyria. In some such embodiments, the iRNA is in a composition, e.g. a composition comprising a lipid formulation (e.g., an LNP formulation) or a composition comprising a GalNAc conjugate.

[0749] In some embodiments, administration of an ALAS1 siRNA is effective to lessen the severity of the attack (e.g., by ameliorating one or more signs or symptoms associated with the attack). In some embodiments, administration of an ALAS1 siRNA is effective to shorten the duration of an attack. In some embodiments, administration of an ALAS1 siRNA is effective to stop an attack. In some embodiments, the iRNA is administered prophylactically to prevent an acute attack of porphyria. In some such embodiments, the iRNA is in the form of a GalNAc conjugate, e.g., in a composition comprising a GalNAc conjugate. In some embodiments, the prophylactic administration is before, during, or after exposure to or occurrence of a precipitating factor. In some embodiments, the subject is at risk of developing porphyria.

[0750] In some embodiments, the siRNA is administered during a prodrome. In some embodiments, the prodrome is characterized by pain (e.g., headache and/or abdominal pain), nausea, psychological symptoms (e.g., anxiety), restlessness and/or insomnia.

[0751] In some embodiments, the siRNA is administered during a particular phase of the menstrual cycle, e.g., during the luteal phase.

[0752] In some embodiments, administration of an ALAS1 siRNA is effective to prevent attacks (e.g., recurrent attacks that are associated with a prodrome and/or with a precipitating factor, e.g., with a particular phase of the menstrual cycle, e.g., the luteal phase). In some embodiments, administration of an ALAS1 siRNA is effective to reduce the frequency of attacks. In embodiments, administration of an ALAS1 siRNA is effective to lessen the severity of the attack (e.g., by ameliorating one or more signs or symptoms associated with the attack). In some embodiments, administration of an ALAS1 siRNA is effective to shorten the duration of an attack. In some embodiments, administration of an ALAS1 siRNA is effective to stop an attack.

[0753] In some embodiments administration of an ALAS1 siRNA is effective to prevent or decrease the frequency or severity of pain, e.g., neuropathic pain.

[0754] In some embodiments administration of an ALAS1 siRNA is effective to prevent or decrease the frequency or severity of neuropathy

[0755] Effects of administration of an ALAS1 siRNA can be established, for example, by comparison with an appropriate control. For example, a decrease in the frequency of acute attacks, as well as a decrease in the level of one or more porphyrins or porphyrin precursors, may be established, for example, in a group of patients with AIP, as a decreased frequency compared with an appropriate control group. A control group (e.g., a group of similar individuals or the same group of individuals in a crossover design) may include, for example, an untreated population, a population that has been treated with a conventional treatment for porphyria (e.g., a conventional treatment for AIP may include glucose, hemin, or both); a population that has been treated with placebo, or a non-targeting iRNA, optionally in combination with one or more conventional treatments for porphyria (e.g., glucose, e.g., IV glucose), and the like.

[0756] A subject “at risk” of developing porphyria, as used herein, includes a subject with a family history of porphyria and/or a history of one or more recurring or chronic porphyric symptoms, and/or a subject who carries a genetic alteration (e.g., a mutation) in a gene encoding an enzyme of the heme biosynthetic pathway, and a subject who carries a genetic alteration, e.g., a mutation. known to be associated with porphyria.

[0757] In embodiments, the alteration, e.g., the mutation, makes an individual susceptible to an acute attack (e.g., upon exposure to a precipitating factor, e.g., a drug, dieting or other precipitating factor, e.g., a precipitating factor as disclosed herein). In embodiments, the alteration, e.g., the mutation, is associated with elevated levels of a porphyrin or a porphyrin precursor (e.g., ALA and/or PBG). In embodiments, the alteration, e.g., the mutation, is associated with chronic pain (e.g., chronic neuropathic pain) and/or neuropathy (e.g., progressive neuropathy). In embodiments, the, the alteration, e.g., the mutation, is associated with changes in EMG and/or nerve conduction velocities.

[0758] In embodiments, the alteration is a mutation in the ALAS1 gene. In embodiments, the alteration is a mutation in the ALAS1 gene promoter, or in regions upstream or downstream from the ALAS1 gene. In embodiments, the alteration is a mutation in transcription factors or other genes that interact with ALAS1. In embodiments, the alteration is an alteration, e.g., a mutation, in a gene that encodes an enzyme in the heme biosynthetic pathway.

[0759] In some embodiments, the subject has an genetic alteration as described herein (e.g., a genetic mutation known to be associated with a porphyria). In some such embodiments, the subject has an elevated level (e.g., urine or plasma level) of ALA and/or PBG. In some such embodiments, the subject does not have an elevated level of ALA and/or PBG. In embodiments, the subject has a genetic alteration as described herein and has other symptoms, e.g., chronic pain, EMG changes, changes in nerve conduction velocity, and/or other symptoms associated with a porphyria. In embodiments, the subject has a genetic alteration but does not suffer from acute attacks.

[0760] In embodiments, the subject has a mutation associated with AIP, HCP, VP, or ADP.

[0761] In some embodiments, the porphyria is AIP. In some such embodiments, the subject has an alteration, e.g., at least one mutation, in the PBG deaminase gene. Many PBG deaminase mutations are known in the art, for example, as reported in Hrdinka, M. et al. Physiological Research, 55 (Suppl 2):S119-136 (2006). In some embodiments, the subject is heterozygous for a PBG deaminase mutation. In other embodiments, the subject is homozygous for a PBG deaminase mutation. A homozygous subject may carry two identical mutations or two different mutations in the PBG deaminase gene.

[0762] In some embodiments, the porphyria is HCP. In some such embodiments, the subject has an alteration, e.g., at least one mutation, in the gene that encodes the enzyme coproporphyrinogen III oxidase.

[0763] In some embodiments, the porphyria is VP. In some such embodiments, the subject has an alteration, e.g., at least one mutation, in the gene that encodes protoporphrinogen oxidase.

[0764] In embodiments, the porphyria is ADP, e.g., autosomal recessive ADP. In some such embodiments, the subject has an alteration, e.g., at least one mutation, in the gene that encodes ALA deydratase.

[0765] Methods of treatment provided herein may serve to ameliorate one or more symptoms associated with porphyria, to reduce the frequency of attacks associated with porphyria, to reduce the likelihood that an attack of one or more symptoms associated with porphyria will occur upon exposure to a precipitating factor, or to reduce the risk of developing conditions associated with porphyria (e.g., neuropathy (e.g., progressive neuropathy), hepatocellular cancer). Additionally, the methods provided herein may serve to decrease the level of one or more porphyrin precursors, porphyrins and/or related porphyrin products or metabolites. The level of a porphyrin precursor or a porhyrin may be measured in any biological sample, such as, e.g., urine, blood, feces, cerebrospinal fluid, or a tissue sample. The sample may be present within a subject or may be obtained or extracted from the subject. In some embodiments, the porphyria is AIP, and the level of PBG and/or ALA is decreased. In some embodiments, the porphyrin product or metabolite is porphobilin, porphobilinogen, or uroporphyrin. A decrease in the level of a porphyrin product or metabolite may be measured using any method known in the art. For example, the level of PBG and/or ALA in urine or plasma may be assessed, using the Watson-Schwartz test, ion exchange chromatography, or high-performance liquid chromatography-mass spectrometry. See, e.g., Thunell (1993).

[0766] Methods described herein may also serve to reduce chronically elevated levels of porphyrin precursors (e.g., ALA and/or PBG) in subjects suffering from a porphyria (e.g., an acute hepatic porphyria, e.g., AIP) or at risk for developing a porphyria. Methods for assessing plasma and urine levels (e.g., chronically elevated levels) of porphyrin precursors include, e.g., HPLC-mass spectrometry and ion-exchange chromatography. The levels of porphyrin precursors may be expressed as the level relative to another protein or compound, e.g., creatinine. See, e.g., Floderus, Y. et al, Clinical Chemistry, 52(4): 701-707, 2006; Sardh et al., Clinical Pharmacokinetics, 46(4): 335-349, 2007

[0767] A “precipitating factor” as used herein, refers to an endogenous or exogenous factor that may induce an acute attack of one or more symptoms associated with porphyria. Precipitating factors include fasting (or other forms of reduced or inadequate caloric intake, due to crash diets, long-distance athletics, etc.), metabolic stresses (e.g., infections, surgery, international air travel, and psychological stress), endogenous hormones (e.g., progesterone), cigarette smoking, lipid-soluble foreign chemicals (including, e.g., chemicals present in tobacco smoke, certain prescription drugs, organic solvents, biocides, components in alcoholic beverages), endocrine factors (e.g., reproductive hormones (women may experience exacerbations during the premenstrual period), synthetic estrogens, progesterones, ovulation stimulants, and hormone replacement therapy). See, for example, Thunell (1993). Common precipitating factors include cytochrome P450 inducing drugs and phenobarbital.

[0768] Symptoms associated with porphyria may include abdominal pain or cramping, headaches, effects caused by nervous system abnormalities, and light sensitivity, causing rashes, blistering, and scarring of the skin (photodermatitis). In certain embodiments, the porphyria is AIP. Symptoms of AIP include gastrointestinal symptoms (e.g., severe and poorly localized abdominal pain, nausea/vomiting, constipation, diarrhea, ileus), urinary symptoms (dysuria, urinary retention/incontinence, or dark urine), neurologic symptoms (e.g., sensory neuropathy, motor neuropathy (e.g., affecting the cranial nerves and/or leading to weakness in the arms or legs), seizures, neuropathic pain, progressive neuropathy, headaches, neuropsychiatric symptoms (e.g., mental confusion, anxiety, agitation, hallucination, hysteria, delirium, apathy, depression, phobias, psychosis, insomnia, somnolence, coma), autonomic nervous system involvement (resulting e.g., in cardiovascular sysmptoms such as tachycardia, hypertension, and/or arrhythmias, as well as other symptoms, such as, e.g., increased circulating catecholamine levels, sweating, restlessness, and/or tremor), dehydration, and electrolyte abnormalities.

[0769] In some embodiments, an iRNA targeting ALAS1 is administered together with (e.g., before, after, or concurrent with) another treatment that may serve to alleviate one or more of the above symptoms. For example, abdominal pain may be treated, e.g., with narcotic analgesics, seizures may be treated, e.g., with anti-seizure medications, nausea/vomiting may be treated, e.g., with phenothiazines, and tachycardia/hypertension may be treated, e.g., with beta blockers.

[0770] The term “decrease” (or “increase”) is intended to refer to a measurable change, e.g., a statistically significant change. The change may be, for example, at least 5%, 10%, 20%, 30%, 40%, 50% or more change (e.g., decrease (or increase) relative to a reference value, e.g., a reference where no iRNA is provided).

[0771] The invention further relates to the use of an iRNA or a pharmaceutical composition thereof, e.g., for treating a disorder related to ALAS1 expression, in combination with other pharmaceuticals and/or other therapeutic methods, e.g., with known pharmaceuticals and/or known therapeutic methods, such as, for example, those which are currently employed for treating the disorder. In one embodiment, the iRNA or pharmaceutical composition thereof can be administered in conjunction with a heme product (e.g., hemin, heme arginate, or heme albumin, as described herein) and/or in conjunction with intravenous glucose infusions. In some embodiments, the iRNA or pharmaceutical composition thereof is used prophylactically, e.g., to prevent or ameliorate symptoms of an anticipated attack of acute porphyria. The prophylactic use may be timed according to the exposure or anticipated exposure of the subject to a precipitating factor. As described herein, a precipitating factor may be any endogenous or exogenous factor known to precipitate an acute attack. For example, the premenstrual phase is an endogenous precipitating factor, and a cytochrome P450 inducing drug is an exogenous precipitating factor.

[0772] The effective amount for the treatment of a disorder related to ALAS1 expression (e.g., a porphyria such as AIP) depends on the type of disorder to be treated, the severity of the symptoms, the subject being treated, the sex, age and general condition of the subject, the mode of administration and so forth. For any given case, an appropriate “effective amount” can be determined by one of ordinary skill in the art using routine experimentation. It is well within the ability of one skilled in the art to monitor efficacy of treatment or prevention by measuring any one of such parameters, or any combination of parameters. In connection with the administration of an iRNA targeting ALAS1 or pharmaceutical composition thereof, “effective against” a disorder related to ALAS1 expression indicates that administration in a clinically appropriate manner results in a beneficial effect, e.g., for an individual patient or for at least a fraction of patients, e.g., a statistically significant fraction of patients. Beneficial effects include, e.g., prevention of or reduction of symptoms or other effects. For example, beneficial effects include, e.g., an improvement (e.g., decrease in the severity or frequency) of symptoms, a reduction in the severity or frequency of attacks, a reduced risk of developing associated disease (e.g., neuropathy (e.g., progressive neuropathy), hepatocellular cancer), an improved ability to tolerate a precipitating factor, an improvement in quality of life, a reduction in the expression of ALAS1, a reduction in a level (e.g., a plasma or urine level) of a porphyrin or a porphyrin precursor (e.g., ALA and/or PBG) or other effect generally recognized as positive by medical doctors familiar with treating the particular type of disorder.

[0773] A treatment or preventive effect is evident when there is an improvement, e.g., a statistically significant improvement in one or more parameters of disease status, or by a failure to worsen or to develop symptoms where they would otherwise be anticipated. As an example, a favorable change of at least 10% in a measurable parameter of disease, e.g., at least 20%, 30%, 40%, 50% or more can be indicative of effective treatment. Efficacy for a given iRNA drug or formulation of that drug can also be judged using an experimental animal model for the given disease as known in the art. When using an experimental animal model, efficacy of treatment is evidenced when a statistically significant reduction in a marker (e.g., plasma or urinary ALA or PBG) or symptom is observed.

[0774] Patients can be administered a therapeutic amount of iRNA. The therapeutic amount can be, e.g., 0.05-50 mg/kg. For example, the therapeutic amount can be 0.05, 0.1, 0.2, 0.3, 0.4, 0.5, 0.6, 0.7, 0.8, 0.9, 1.0, 1.5, 2.0, or 2.5, 3.0, 3.5, 4.0, 4.5, 5, 10, 15, 20, 25, 30, 35, 40, 45, or 50 mg/kg dsRNA.

[0775] In some embodiments, the iRNA is formulated as a lipid formulation, e.g., an LNP formulation as described herein. In some such embodiments, the therapeutic amount is 0.05-5 mg/kg, e.g., 0.05, 0.1, 0.2, 0.3, 0.4, 0.5, 0.6, 0.7, 0.8, 0.9, 1.0, 1.5, 2.0, 2.5, 3.0, 3.5, 4.0, 4.5, or 5.0 mg/kg dsRNA. In some embodiments, the lipid formulation, e.g., LNP formulation, is administered intravenously.

[0776] In some embodiments, the iRNA is administered by intravenous infusion over a period of time, such as over a 5 minute, 10 minute, 15 minute, 20 minute, or 25 minute period.

[0777] In some embodiments, the iRNA is in the form of a GalNAc conjugate as described herein. In some such embodiments, the therapeutic amount is 0.5-50 mg, e.g., 0.5, 0.6, 0.7, 0.8, 0.9, 1.0, 1.5, 2.0, 2.5, 3.0, 3.5, 4.0, 4.5, 5.0, 6, 7, 8, 9, 10, 15, 20, 25, 30, 35, 40, 45, or 50 mg/kg dsRNA. In some embodiments, the GalNAc conjugate is administered subcutaneously.

[0778] In some embodiments, the administration is repeated, for example, on a regular basis, such as, daily, biweekly (i.e., every two weeks) for one month, two months, three months, four months or longer. After an initial treatment regimen, the treatments can be administered on a less frequent basis. For example, after administration biweekly for three months, administration can be repeated once per month, for six months or a year or longer.

[0779] In some embodiments, the iRNA agent is administered in two or more doses. In some embodiments, the number or amount of subsequent doses is dependent on the achievement of a desired effect, e.g., suppression of a ALAS gene, reduction of a level of a porphyrin or porphyrin precursor (e.g., ALA and/or PBG), or the achievement of a therapeutic or prophylactic effect, e.g., reduction or prevention of one or more symptoms associated with porphyria (e.g., pain, e.g., neuropathic pain), and/or prevention of attacks or reduction in the frequency and/or severity of attacks associated with porphyria.

[0780] In some embodiments, the iRNA agent is administered according to a schedule. For example, the iRNA agent may be administered once per week, twice per week, three times per week, four times per week, or five times per week. In some embodiments, the schedule involves regularly spaced administrations, e.g., hourly, every four hours, every six hours, every eight hours, every twelve hours, daily, every 2 days, every 3 days, every 4 days, every 5 days, weekly, biweekly, or monthly. In embodiments, the iRNA agent is administered weekly or biweekly to achieve a desired effect, e.g., to decrease the level of ALA and/or PBG, to decrease pain, and/or to prevent acute attacks.

[0781] In embodiments, the schedule involves closely spaced administrations followed by a longer period of time during which the agent is not administered. For example, the schedule may involve an initial set of doses that are administered in a relatively short period of time (e.g., about every 6 hours, about every 12 hours, about every 24 hours, about every 48 hours, or about every 72 hours) followed by a longer time period (e.g., about 1 week, about 2 weeks, about 3 weeks, about 4 weeks, about 5 weeks, about 6 weeks, about 7 weeks, or about 8 weeks) during which the iRNA agent is not administered. In one embodiment, the iRNA agent is initially administered hourly and is later administered at a longer interval (e.g., daily, weekly, biweekly, or monthly). In another embodiment, the iRNA agent is initially administered daily and is later administered at a longer interval (e.g., weekly, biweekly, or monthly). In certain embodiments, the longer interval increases over time or is determined based on the achievement of a desired effect. In a specific embodiment, the iRNA agent is administered once daily during an acute attack, followed by weekly dosing starting on the eighth day of administration. In another specific embodiment, the iRNA agent is administered every other day during a first week followed by weekly dosing starting on the eighth day of administration.

[0782] In one embodiment, the iRNA agent is administered to prevent or reduce the severity or frequency of recurring attacks, e.g., cyclical attacks associated with a precipitating factor. In some embodiments, the precipitating factor is the menstrual cycle. In some embodiments, the iRNA is administered repeatedly, e.g., at regular intervals to prevent or reduce the severity or frequency of recurring attacks, e.g., cyclical attacks associated with a precipitating factor, e.g., the menstrual cycle, e.g., a particular phase of the menstrual cycle, e.g., the luteal phase. In some embodiments, the iRNA is administered during a particular phase of the menstrual cycle or based on hormone levels of the patient being treated (e.g., based on hormone levels that are associated with a particular phase of the menstrual cycle). In some embodiments, the iRNA is administered on one or more particular days of the menstrual cycle, e.g., on day 1, 2, 3, 4, 5, 6, 7, 8. 9. 10. 11. 12. 13, 14, 15, 16, 17, 18, 19, 20, 21, 22, 23, 24, 25, 26, 27, or on day 28 (or later day for subjects who have a longer menstrual cycle). In some embodiments, the iRNA is administered during the luteal phase, e.g., on one or more days between days 14-28 of the menstrual cycle (or later, in subjects who have a menstrual cycle longer than 28 days). In some embodiments, ovulation of the subject is assessed (e.g., using a blood or urine test that detects a hormone associated with ovulation, e.g., LH) and the iRNA is administered at a predetermined interval after ovulation. In some embodiments, the iRNA is administered immediately after ovulation. In some embodiments, the iRNA is administered 1, 2, 3, 4, 5, 6, 7, 8, 9, 10, 11, 12, 13, 14, 15, 16, 17, or 18 days after ovulation. Any of these schedules may optionally be repeated for one or more iterations. The number of iterations may depend on the achievement of a desired effect, e.g., the suppression of a ALAS1 gene and/or the achievement of a therapeutic or prophylactic effect, e.g., reduce or prevent one or more symptoms associated with porphyria, to reduce the frequency of attacks associated with porphyria.

[0783] In some embodiments, an initial dose of the iRNA agent is administered and the level of ALA or PBG is tested, e.g., 1-48 hours, e.g., 2, 4, 8, 12, or 24 hours following administration of the initial dose. In some embodiments, if the level of ALA and/or PBG has decreased (e.g., to achieve a predetermined reduction, e.g., a normalization), and/or if the symptoms associated with porphyria (e.g., pain) have improved (e.g., such that the patient is asymptomatic), no further dose is administered, whereas if the level of ALA and/or PBG has not decreased (e.g., has not achieved a predetermined reduction, e.g., has not normalized), a further dose of ALA or PBG is administered. In some embodiments, the further dose is administered 12, 24, 36, 48, 60, or 72 hours after the initial dose. In some embodiments, if the initial dose is not effective to decrease the level of ALA and/or PBG, the further dose is modified, e.g., increased to achieve a desired decrease (e.g., a predetermined reduction, e.g., a normalization) in ALA or PBG levels.

[0784] In some embodiments, the predetermined reduction is a decrease of at least 10%, 20%, 30%, 40%, or 50%. In some embodiments, the predetermined reduction is a reduction that is effective to prevent or ameliorate symptoms, e.g., pain, prodromal symptoms, or recurring attacks.

[0785] In some embodiments, the predetermined reduction is a reduction of at least 1, 2, 3, or more standard deviations, wherein the standard deviation is determined based on the values from a reference sample, e.g., a reference sample as described herein.

[0786] In some embodiments, the predetermined reduction is a reduction that brings the level of the porphyrin or porphyrin precursor to a level that is less than, or to a level that is less than or equal to, a reference value (e.g., a reference value as described herein).

[0787] As used herein, a “normalization” in ALA or PBG levels (or a “normal” or “normalized” level) refers to a level (e.g., a urine and/or plasma level) of either ALA, or PBG, or both, that is within the expected range for a healthy individual, an individual who is asymptomatic (e.g., an individual who does not experience pain and/or suffer from neuropathy), or an individual who does not have a mutation associated with a porphyria. For example, in some embodiments, a normalized level is within two standard deviations of the normal mean. In some embodiments, a normalized level is within normal reference limits, e.g., within the 95% confidence interval for an appropriate control sample, e.g., a sample of healthy individuals or individuals who do not carry a gene mutation associated with a porphyria. In some embodiments, the ALA and/or PBG level of the subject (e.g., the urine and/or plasma ALA and/or PBG level) is monitored at intervals, a further dose of the iRNA agent is administered when the level increases above the reference value

[0788] Administration of the iRNA may reduce ALAS1 mRNA or protein levels, e.g., in a cell, tissue, blood, urine or other compartment of the patient by at least 10%, at least 15%, at least 20%, at least 25%, at least 30%, at least 40%, at least 50%, at least 60%, at least 70%, at least 80% or at least 90% or more. Administration of the iRNA may reduce levels of products associated with ALAS1 gene expression, e.g., levels of one or more porphyrins or porphyrin precursors (e.g., the level of ALA and/or PBG). Administration of the iRNA agent may also inhibit or prevent the upregulation of ALAS1 mRNA or protein levels during an acute attack of AIP.

[0789] Before administration of a full dose of the iRNA, patients can be administered a smaller dose, such as a 5% infusion dose, and monitored for adverse effects, such as an allergic reaction, or for elevated lipid levels or blood pressure. In another example, the patient can be monitored for unwanted effects.

[0790] Methods for Modulating Expression of an ALAS1 Gene

[0791] In yet another aspect, the invention provides a method for modulating (e.g., inhibiting or activating) the expression of an ALAS1 gene, e.g., in a cell or in a subject. In some embodiments, the cell is ex vivo, in vitro, or in vivo. In some embodiments, the cell is an erythroid cell or a hepatocyte. In some embodiments, the cell is in a subject (e.g., a mammal, such as, for example, a human) In some embodiments, the subject (e.g., the human) is at risk, or is diagnosed with a disease related to ALAS1 expression, as described above.

[0792] In one embodiment, the method includes contacting the cell with an iRNA as described herein, in an amount effective to decrease the expression of an ALAS1 gene in the cell. “Contacting,” as used herein, includes directly contacting a cell, as well as indirectly contacting a cell. For example, a cell within a subject (e.g., an erythroid cell or a liver cell, such as a hepatocyte) may be contacted when a composition comprising an iRNA is administered (e.g., intravenously or subcutaneously) to the subject.

[0793] The expression of an ALAS1 gene may be assessed based on the level of expression of an ALAS1 mRNA, an ALAS1 protein, or the level of a parameter functionally linked to the level of expression of an ALAS1 gene (e.g., the level of a porphyrin or the incidence or severity of a symptom related to a porphyria). In some embodiments, the expression of ALAS1 is inhibited by at least 5%, at least 10%, at least 15%, at least 20%, at least 25%, at least 30%, at least 35%, at least 40%, at least 45%, at least 50%, at least 55%, at least 60%, at least 65%, at least 70%, at least 75%, at least 80%, at least 85%, at least 90%, or at least 95%. In some embodiments, the iRNA has an IC₅₀ in the range of 0.001-0.01 nM, 0.001-0.10 nM, 0.001-1.0 nM, 0.001-10 nM, 0.01-0.05 nM, 0.01-0.50 nM, 0.02-0.60 nM, 0.01-1.0 nM, 0.01-1.5 nM, 0.01-10 nM. The IC₅₀ value may be normalized relative to an appropriate control value, e.g., the IC₅₀ of a non-targeting iRNA.

[0794] In some embodiments, the method includes introducing into the cell an iRNA as described herein and maintaining the cell for a time sufficient to obtain degradation of the mRNA transcript of an ALAS1 gene, thereby inhibiting the expression of the ALAS1 gene in the cell.

[0795] In one embodiment, the method includes administering a composition described herein, e.g., a composition comprising an iRNA that targets ALAS1, to the mammal such that expression of the target ALAS1 gene is decreased, such as for an extended duration, e.g., at least two, three, four days or more, e.g., one week, two weeks, three weeks, or four weeks or longer. In some embodiments, the decrease in expression of ALAS1 is detectable within 1 hour, 2 hours, 4 hours, 8 hours, 12 hours, or 24 hours of the first administration.

[0796] In another embodiment, the method includes administering a composition as described herein to a mammal such that expression of the target ALAS1 gene is increased by e.g., at least 10% compared to an untreated animal. In some embodiments, the activation of ALAS1 occurs over an extended duration, e.g., at least two, three, four days or more, e.g., one week, two weeks, three weeks, four weeks, or more. Without wishing to be bound by theory, an iRNA can activate ALAS1 expression by stabilizing the ALAS1 mRNA transcript, interacting with a promoter in the genome, and/or inhibiting an inhibitor of ALAS1 expression.

[0797] The iRNAs useful for the methods and compositions featured in the invention specifically target RNAs (primary or processed) of an ALAS1 gene. Compositions and methods for inhibiting the expression of an ALAS1 gene using iRNAs can be prepared and performed as described elsewhere herein.

[0798] In one embodiment, the method includes administering a composition containing an iRNA, where the iRNA includes a nucleotide sequence that is complementary to at least a part of an RNA transcript of the ALAS1 gene of the mammal to be treated. When the organism to be treated is a mammal such as a human, the composition may be administered by any means known in the art including, but not limited to oral, intraperitoneal, or parenteral routes, including intracranial (e.g., intraventricular, intraparenchymal and intrathecal), intravenous, intramuscular, subcutaneous, transdermal, airway (aerosol), nasal, rectal, and topical (including buccal and sublingual) administration.

[0799] In certain embodiments, the compositions are administered by intravenous infusion or injection. In some such embodiments, the compositions comprise a lipid formulated siRNA (e.g., an LNP formulation, such as an LNP11 formulation) for intravenous infusion. In particular embodiments, such compositions may be used to treat acute attacks of porphyria and/or for prophylaxis (e.g., to decrease the severity or frequency of attacks).

[0800] In other embodiments, the compositions are administered subcutaneously. In some such embodiments, the compositions comprise an iRNA conjugated to a GalNAc ligand. In particular embodiments, such compositions may be used to treat acute attacks of porphyria or for prophylaxis (e.g., to decrease the severity or frequency of attacks).

[0801] Methods for Decreasing a Level of a Porphyrin or Porphyrin Precursor

[0802] In another aspect, the invention provides a method for decreasing a level of a porphyrin or a porphyrin precursor, e.g., in a cell or in a subject.

[0803] In some embodiments, the cell is ex vivo, in vitro, or in vivo. In some embodiments, the cell is an erythroid cell or a hepatocyte. In some embodiments, the cell is a hepatocyte. In some embodiments, the cell is in a subject (e.g., a mammal, such as, for example, a human).

[0804] In some embodiments, the subject (e.g., the human) is at risk, or is diagnosed with a porphyria, as described herein. In some embodiments, the method is effective to treat a porphyria as described herein (e.g., by ameliorating one or more symptoms associated with a porphyria, reducing the frequency of attacks associated with a porphyria, reducing the likelihood that an attack of one or more symptoms associated with porphyria will occur upon exposure to a precipitating factor, or reducing the risk of developing conditions associated with a porphyria (e.g., neuropathy (e.g., progressive neuropathy), hepatocellular cancer). In one embodiment, the method includes contacting the cell with an RNAi, as described herein, in an amount sufficient to decrease the level of the porphyrin or porphyrin precursor (e.g., ALA or PBG) in the cell, or in another related cell or group of cells, or in the subject. “Contacting,” as used herein, includes directly contacting a cell, as well as indirectly contacting a cell. For example, a cell within a subject (e.g., an erythroid cell or a liver cell, such as a hepatocyte) may be contacted when a composition comprising an RNAi is administered (e.g., intravenously or subcutaneously) to the subject. “Another related cell or group of cells,” as used herein, includes any cell or group of cells in which the level of the porphyrin or porphyrin precursor decreases as a result of the contacting. For example, the cell may be part of a tissue present within a subject (e.g., a liver cell present within a subject), and contacting the cell within the subject (e.g., contacting one or more liver cells present within a subject) with the RNAi may result in a decrease in the level of the porphyrin or porphyrin precursor in another related cell or group of cells (e.g., nerve cells of the subject), or in a tissue or fluid of the subject (e.g., in the urine, blood, plasma, or cerebrospinal fluid of the subject).

[0805] In some embodiments, the porphyrin or porphyrin precursor is selected from the group consisting of δ-aminolevulinic acid (ALA), porphopilinogen (PBG), hydroxymethylbilane (HMB), uroporphyrinogen III, coproporphyrinogen III, protoporphrinogen IX, and protoporphyrin IX In some embodiments the porphyrin precursor is ALA. In some embodiments, the porphyrin precursor is PBG. In some embodiments, the method decreases the level of ALA and PBG. The level of a porphyrin or a porphyrin precursor may be measured as described herein and as known in the art.

[0806] Assays and Methods for Monitoring RNAi Activity

[0807] In another aspect, the invention provides assays and methods for monitoring ALAS1 mRNA levels. RNAi activity in the liver can be monitored by detecting mRNA levels or 5′RACE product in tissue, or by detecting the level of circulating secreted protein.

[0808] Alternatively, or in combination, circulating extracellular levels of ALAS1 mRNA can be detected, e.g., by cERD assays (Circulating Extracellular RNA Detection). In some embodiments, the ALAS1 mRNA level can be detected in a bodily fluid sample, e.g., a serum or urine sample. In some embodiments, exosomes are shed into bodily fluids from different cells types, which contain mRNA and miRNA derived from a tissue of origin. Such exosomes can be used to monitor the level of RNAi in circulation. In one embodiment, a sample, e.g., a serum or urine sample from a subject treated with an iRNA described herein can be purified with low speed spin, followed by a spin at about 160,000 g for about 2 hours to form a pellet. RNA can be extracted and analyzed to measure the levels of ALAS1 mRNA. Exemplary methods and assays are disclosed in PCT/US2012/043584, published as WO 2012/177906, the contents of which are incorporated by reference.

[0809] Accordingly, an assay, or method, is provided for detecting the level of circulating extracellular ALAS1 mRNA in a subject. The assay, or method includes providing RNA (e.g., extracellular RNA) from a biological fluid sample (e.g., urine, blood or plasma sample) from the subject, said biological fluid sample comprising the ALAS1 mRNA; and detecting the level of circulating extracellular ALAS1 mRNA in the sample.

[0810] In one embodiment, the assay or method includes the step of obtaining an ALAS1 cDNA from the ALAS1 mRNA; and contacting the ALAS1 cDNA with a nucleic acid complementary (e.g., probe and/or primer) to the ALAS1 cDNA or a portion thereof, thereby producing a reaction mix; and detecting (e.g., measuring) the level of ALAS1 cDNA in the reaction mix, wherein the ALAS1 cDNA level is indicative of the ALAS1 mRNA level, thereby assaying the level of circulating extracellular ALAS1 mRNA in the subject.

[0811] In one embodiment, the assay or method includes acquiring a biological fluid sample from a subject, where the biological sample is separate from the tissue, and where the biological sample contains exosomes. The assay or method can further include detecting the levels of an RNA in the biological sample, where the RNA is expressed from the gene in the tissue of the subject, where the exosomes are not purified from the biological sample prior to detecting levels of RNA in the biological sample.

[0812] In embodiments, said biological fluid sample is a blood sample. In embodiments, said biological fluid sample is a serum sample. In another embodiment, the biological fluid sample is a urine sample.

[0813] In embodiments, the method comprises PCR, qPCR or 5′-RACE.

[0814] In embodiments, said nucleic acid is a probe or primer.

[0815] In embodiments, said nucleic acid comprises a detectable moiety and the level of ALAS1 mRNA is determined by detection of the amount of the detectable moiety.

[0816] In embodiments, said method further comprises obtaining the biological fluid sample from the subject.

[0817] In embodiments of these methods, the efficacy of a porphyria treatment is assessed based on a comparison of the level of circulating extracellular ALAS1 mRNA in the subject relative to a reference value.

[0818] In embodiments, a decrease in the level of circulating extracellular ALAS1 mRNA in the subject in response to the porphyria treatment, relative to the reference value, indicates that the porphyria treatment is efficacious. In embodiments, the reference value is the level of circulating extracellular ALAS1 mRNA in the subject prior to the porphyria treatment.

[0819] Unless otherwise defined, all technical and scientific terms used herein have the same meaning as commonly understood by one of ordinary skill in the art to which this invention belongs. Although methods and materials similar or equivalent to those described herein can be used in the practice or testing of the iRNAs and methods featured in the invention, suitable methods and materials are described below. All publications, patent applications, patents, and other references mentioned herein are incorporated by reference in their entirety. In case of conflict, the present specification, including definitions, will control. In addition, the materials, methods, and examples are illustrative only and not intended to be limiting.

### EXAMPLES

### Example 1

### siRNA Synthesis

[0820] Source of Reagents

[0821] Where the source of a reagent is not specifically given herein, such reagent may be obtained from any supplier of reagents for molecular biology at a quality/purity standard for application in molecular biology.

### Oligonucleotide Synthesis.

[0822] All oligonucleotides are synthesized on an AKTAoligopilot synthesizer. Commercially available controlled pore glass solid support (dT-CPG, 500\acute{Å}, Prime Synthesis) and RNA phosphoramidites with standard protecting groups, 5′-O-dimethoxytrityl N6-benzoyl-2′-t-butyldimethylsilyl-adenosine-3′-O—N,N′-diisopropyl-2-cyanoethylphosphoramidite, 5′-O-dimethoxytrityl-N4-acetyl-2′-t-butyldimethylsilyl-cytidine-3′-O—N,N′-diisopropyl-2-cyanoethylphosphoramidite, 5′-O-dimethoxytrityl-N2-isobutryl-2′-t-butyldimethylsilyl-guanosine-3′-O—N,N′-diisopropyl-2-cyanoethylphosphoramidite, and 5′-O-dimethoxytrityl-2′-t-butyldimethylsilyl-uridine-3′-O—N,N′-diisopropyl-2-cyanoethylphosphoramidite (Pierce Nucleic Acids Technologies) were used for the oligonucleotide synthesis. The 2′-F phosphoramidites, 5′-O-dimethoxytrityl-N4-acetyl-2′-fluro-cytidine-3′-O—N,N′-diisopropyl-2-cyanoethyl-phosphoramidite and 5′-O-dimethoxytrityl-2′-fluro-uridine-3′-O—N,N′-diisopropyl-2-cyanoethyl-phosphoramidite are purchased from (Promega). All phosphoramidites are used at a concentration of 0.2M in acetonitrile (CH₃CN) except for guanosine which is used at 0.2M concentration in 10% THF/ANC (v/v). Coupling/recycling time of 16 minutes is used. The activator is 5-ethyl thiotetrazole (0.75M, American International Chemicals); for the PO-oxidation iodine/water/pyridine is used and for the PS-oxidation PADS (2%) in 2,6-lutidine/ACN (1:1 v/v) is used.

[0823] 3′-ligand conjugated strands are synthesized using solid support containing the corresponding ligand. For example, the introduction of cholesterol unit in the sequence is performed from a hydroxyprolinol-cholesterol phosphoramidite. Cholesterol is tethered to trans-4-hydroxyprolinol via a 6-aminohexanoate linkage to obtain a hydroxyprolinol-cholesterol moiety. 5′-end Cy-3 and Cy-5.5 (fluorophore) labeled iRNAs are synthesized from the corresponding Quasar-570 (Cy-3) phosphoramidite are purchased from Biosearch Technologies. Conjugation of ligands to 5′-end and or internal position is achieved by using appropriately protected ligand-phosphoramidite building block. An extended 15 min coupling of 0.1 M solution of phosphoramidite in anhydrous CH₃CN in the presence of 5-(ethylthio)-1H-tetrazole activator to a solid-support-bound oligonucleotide. Oxidation of the internucleotide phosphite to the phosphate is carried out using standard iodine-water as reported (1) or by treatment with tert-butyl hydroperoxide/acetonitrile/water (10:87:3) with 10 min oxidation wait time conjugated oligonucleotide. Phosphorothioate is introduced by the oxidation of phosphite to phosphorothioate by using a sulfur transfer reagent such as DDTT (purchased from AM Chemicals), PADS and or Beaucage reagent. The cholesterol phosphoramidite is synthesized in house and used at a concentration of 0.1 M in dichloromethane. Coupling time for the cholesterol phosphoramidite is 16 minutes.

### Deprotection I (Nucleobase Deprotection)

[0824] After completion of synthesis, the support is transferred to a 100 mL glass bottle (VWR). The oligonucleotide is cleaved from the support with simultaneous deprotection of base and phosphate groups with 80 mL of a mixture of ethanolic ammonia [ammonia: ethanol (3:1)] for 6.5 h at 55° C. The bottle is cooled briefly on ice and then the ethanolic ammonia mixture is filtered into a new 250-mL bottle. The CPG is washed with 2×40 mL portions of ethanol/water (1:1 v/v). The volume of the mixture is then reduced to ˜30 mL by roto-vap. The mixture is then frozen on dry ice and dried under vacuum on a speed vac.

### Deprotection II (Removal of 2′-TBDMS Group)

[0825] The dried residue is resuspended in 26 mL of triethylamine, triethylamine trihydrofluoride (TEA.3HF) or pyridine-HF and DMSO (3:4:6) and heated at 60° C. for 90 minutes to remove the tert-butyldimethylsilyl (TBDMS) groups at the 2′ position. The reaction is then quenched with 50 mL of 20 mM sodium acetate and the pH is adjusted to 6.5. Oligonucleotide is stored in a freezer until purification.

### Analysis

[0826] The oligonucleotides are analyzed by high-performance liquid chromatography (HPLC) prior to purification and selection of buffer and column depends on nature of the sequence and or conjugated ligand.

### HPLC Purification

[0827] The ligand-conjugated oligonucleotides are purified by reverse-phase preparative HPLC. The unconjugated oligonucleotides are purified by anion-exchange HPLC on a TSK gel column packed in house. The buffers are 20 mM sodium phosphate (pH 8.5) in 10% CH₃CN (buffer A) and 20 mM sodium phosphate (pH 8.5) in 10% CH₃CN, 1M NaBr (buffer B). Fractions containing full-length oligonucleotides are pooled, desalted, and lyophilized. Approximately 0.15 OD of desalted oligonucleotidess are diluted in water to 150 μL and then pipetted into special vials for CGE and LC/MS analysis. Compounds are then analyzed by LC-ESMS and CGE.

siRNA Preparation

[0828] For the general preparation of siRNA, equimolar amounts of sense and antisense strand are heated in 1×PBS at 95° C. for 5 min and slowly cooled to room temperature. Integrity of the duplex is confirmed by HPLC analysis. Nucleic acid sequences are represented below using standard nomenclature, and specifically the abbreviations of Table 1.

TABLE 1
Abbreviations of nucleotide monomers used in nucleic acid sequence representation. It will be understood that these monomers, when present
in an oligonucleotide, are mutually linked by 5′-3′-phosphodiester bonds.

| Abbreviation | Nucleotide(s)/Nucleosides |
|---|---|
| A | Adenosine-3′-phosphate, 2′-deoxy-2′-fluorouridine-5′-phosphate or adenosine |
| Ab | beta-L-adenosine-3′-phosphate, beta-L-adenosine-5′-phosphate or beta-L-adenosine |
| Abs | beta-L-adenosine-3′-phosphorothioate |
| Af | 2′-deoxy-2′-fluoroadenosine-3′-phosphate, 2′-deoxy-2′-fluoroadenosine-5′-phosphate or 2′-deoxy-2′-fluoroadenosine |
| Afs | 2′-deoxy-2′-fluoroadenosine-3′-phosphorothioate |
| As | adenosine-3′-phosphorothioate |
| C | cytidine-3′-phosphate, cytidine-5′-phosphate or cytidine |
| Cb | beta-L-cytidine-3′-phosphate or beta-L-cytidine |
| Cbs | beta-L-cytidine-3′-phosphorothioate |
| Cf | 2′-deoxy-2′-fluorocytidine-3′-phosphate, 2′-deoxy-2′-fluorocytidine-5′-phosphate or 2′-deoxy-2′-fluorocytidine |
| Cfs | 2′-deoxy-2′-fluorocytidine-3′-phosphorothioate |
| (Chd) | 2′-O-hexadecyl-cytidine-3′-phosphate or 2′-O-hexadecyl-cytidine |
| (Chds) | 2′-O-hexadecyl-cytidine-3′-phosphorothioate |
| Cs | cytidine-3′-phosphorothioate |
| G | guanosine-3′-phosphate, guanosine-5′-phosphate or guanosine |
| Gb | beta-L-guanosine-3′-phosphate, beta-L-guanosine-5′-phosphate or beta-L-guanosine |
| Gbs | beta-L-guanosine-3′-phosphorothioate |
| Gf | 2′-deoxy-2′-fluoroguanosine-3′-phosphate, 2′-deoxy-2′-fluoroguanosine-5′-phosphate or 2′-deoxy-2′-fluoroguanosine |
| Gfs | 2′-deoxy-2′-fluoroguanosine-3′-phosphorothioate |
| Gs | guanosine-3′-phosphorothioate |
| T | 5′-methyluridine-3′-phosphate, 5′-methyluridine-5′-phosphate or 5′-methyluridine |
| Tb | beta-L-thymidine-3′-phosphate, beta-L-thymidine-5′-phosphate or beta-L-thymidine |
| Tbs | beta-L-thymidine-3′-phosphorothioate |
| Tf | 2′-deoxy-2′-fluoro-5-methyluridine-3′-phosphate, 2′-deoxy-2′-fluoro-5-methyluridine-3′-phosphate or 2′-deoxy-2′-fluoro-5- |
| | methyluridine |
| Tfs | 2′-deoxy-2′-fluoro-5-methyluridine-3′-phosphorothioate |
| Ts | 5-methyluridine-3′-phosphorothioate |
| U | Uridine-3′-phosphate, uridine-5′-phosphate or uridine- |
| Ub | beta-L-uridine-3′-phosphate, beta-L-uridine-5′-phosphate or beta-L-uridine |
| Ubs | beta-L-uridine-3′-phosphorothioate |
| Uf | 2′-deoxy-2′-fluorouridine-3′-phosphate, 2′-deoxy-2′-fluorouridine or 2′-deoxy-2′-fluorouridine-3′-phosphate |
| Ufs | 2′-deoxy-2′-fluorouridine-3′-phosphorothioate |
| (Uhd) | 2′-O-hexadecyl-uridine-3′-phosphate, 2′-O-hexadecyl-uridine-6′-phosphate or 2′-O-hexadecyl-uridine |
| (Uhds) | 2′-O-hexadecyl-uridine-3′-phosphorothioate |
| Us | uridine-3′-phosphorothioate |
| N | any nucleotide (G, A, C, T or U) |
| a | 2′-O-methyladenosine-3′-phosphate, 2′-O-methyladenosine-5′-phosphate or 2′-O-methyladenosine |
| as | 2′-O-methyladenosine-3′-phosphorothioate |
| c | 2′-O-methylcytidine-3′-phosphate, 2′-O-methylcytidine-5′-phosphate or 2′-O-methylcytidine |
| cs | 2′-O-methylcytidine-3′-phosphorothioate |
| g | 2′-O-methylguanosine-3′-phosphate, 2′-O-methylguanosine-5′-phosphate or 2′-O-methylguanosine |
| gs | 2′-O-methylguanosine-3′-phosphorothioate |
| t | 2′-O-methyl-5-methyluridine-3′-phosphate, 2′-O-methyl-5-methyluridine-5′-phosphate or 2′-O-methyl-5-methyluridine |
| ts | 2′-O-methyl-5-methyluridine-3′-phosphorothioate |
| u | 2′-O-methyluridine-3′-phosphate, 2′-O-methyluridine-5′-phosphate or 2′-O-methyluridine |
| us | 2′-O-methyluridine-3′-phosphorothioate |
| dA | 2′-deoxyadenosine-3′-phosphate, 2′-deoxyadenosine-5′-phosphate or 2′-deoxyadenosine |
| dAs | 2′-deoxyadenosine-3′-phosphorothioate |
| dC | 2′-deoxycytidine-3′-phosphate, 2′-deoxycytidine-5′-phosphate or 2′-deoxycytidine |
| dCs | 2′-deoxycytidine-3′-phosphorothioate |
| dG | 2′-deoxyguanosine-3′-phosphate, 2′-deoxyguanosine-5′-phosphate or 2′-deoxyguanosine |
| dGs | 2′-deoxyguanosine-3′-phosphorothioate or 2′-deoxyguanosine |
| dT | 2′-deoxythymidine-3′-phosphate, 2′-deoxythymidine-5′-phosphate or 2′-deoxythymidine |
| dTs | 2′-deoxythymidine-3′-phosphorothioate |
| dU | 2′-deoxyuridine-3′-phosphate, 2′-deoxyuridine-5′-phosphate or 2′-deoxyuridine |
| s | phosphorothioate linkage |
| L96¹ | N-[tris(GalNAc-alkyl)-amidodecanoyl)]-4-hydroxyprolinol Hyp-(GalNAc-alkyl)3 |
| (Aeo) | 2′-O-methoxyethyladenosine-3′-phosphate, 2′-O-methoxyethyladenosine-5′-phosphate or 2′-O-methoxyethyladenosine |
| (Aeos) | 2′-O-methoxyethyladenosine-3′-phosphorothioate |
| (Ceo) | 2′-O-methoxyethylcytidine-3′-phosphate, 2′-O-methoxyethylcytidine-5′-phosphate or 2′-O-methoxyethylcytidine |
| (Ceos) | 2′-O-methoxyethylcytidine-3′-phosphorothioate |
| (Geo) | 2′-O-methoxyethylguanosine-3′-phosphate, 2′-O-methoxyethylguanosine-5′-phosphate or 2′-O-methoxyethylguanosine |
| (Geos) | 2′-O-methoxyethylguanosine-3′-phosphorothioate |
| (Teo) | 2′-O-methoxyethyl-5-methyluridine-3′-phosphate, 2′-O-methoxyethyl-5-methyluridine-5′-phosphate or 2′-O-methoxyethyl- |
| | 5-methyluridine |
| (Teos) | 2′-O-methoxyethyl-5-methyluridine-3′-phosphorothioate |
| (m5Ceo) | 2′-O-methoxyethyl-5-methylcytidine-3′-phosphate, 2′-O-methoxyethyl-5-methylcytidine-5′-phosphate or 2′-O- |
| | methoxyethyl-5-methylcytidine |
| (m5Ceos) | 2′-O-methoxyethyl-5-methylcytidine-3′-phosphorothioate |
| (Agn) | 1-(2,3-Dihydroxypropyl)adenine-2-phosphate, 1-(2,3-Dihydroxypropyl)adenine-3-phosphate or 1-(2,3-Dihydroxypropyl) |
| | adenine |
| (Agns) | 1-(2,3-Dihydroxypropyl)adenine-2-phosphorothioate |
| (Cgn) | 1-(2,3-Dihydroxypropyl)cytosine-2-phosphate, 1-(2,3-Dihydroxypropyl)cytosine-3-phosphate or 1-(2,3-Dihydroxypropyl) |
| | cytosine |
| (Cgns) | 1-(2,3-Dihydroxypropyl)cytosine-2-phosphorothioate |
| (Ggn) | 1-(2,3-Dihydroxypropyl)guanine-2-phosphate, 1-(2,3-Dihydroxypropyl)guanine-3-phosphate or 1-(2,3-Dihydroxypropyl) |
| | guanine |
| (Ggns) | 1-(2,3-Dihydroxypropyl)guanine-2-phosphorothiaote |
| (Tgn) | 1-(2,3-Dihydroxypropyl)thymine-2-phosphate, 1-(2,3-Dihydroxypropyl)thymine-3-phosphate or 1-(2,3-Dihydroxypropyl) |
| | thymine |
| (Tgns) | 1-(2,3-Dihydroxypropyl)thymine-2-phosphorothioate |
| (Ugn) | 1-(2,3-Dihydroxypropyl)uracil-2-phosphate, 1-(2,3-Dihydroxypropyl)uracil-3-phosphate or 1-(2,3-Dihydroxypropyl) |
| | thymine |
| (Ugns) | 1-(2,3-Dihydroxypropyl)uracil-2-phosphorothioate |

¹The chemical structure of L96 is as follows:

[chemical structure]

### Example 2

### ALAS1 siRNA Design and Synthesis

### Experimental Methods

### Bioinformatics

### Transcripts

[0829] siRNA design was carried out to identify siRNAs targeting human, rhesus (Macaca mulatta), mouse, and rat ALAS1 transcripts annotated in the NCBI Gene database (http://www.ncbi.nlm.nih.gov/gene/). Design used the following transcripts from the NCBI RefSeq collection: Human—NM_000688.4 (see FIG. 3), NM_199166.1; Rhesus—XM_001090440.2, XM_001090675.2; Mouse—NM_020559.2; Rat—NM_024484.2. Due to high primate/rodent sequence divergence, siRNA duplexes were designed in several separate batches, including but not limited to batches containing duplexes matching human and rhesus transcripts only; human, rhesus, mouse, and rat transcripts only; and mouse and rat transcripts only. Most siRNA duplexes were designed that shared 100% identity the listed human transcript and other species transcripts considered in each design batch (above). In some instances, (see Table 8) mismatches between duplex and mRNA target were allowed at the first antisense (last sense) position when the antisense strand:target mRNA complementary basepair was a GC or CG pair. In these cases, duplexes were designed with UA or AU pairs at the first antisense:last sense pair. Thus the duplexes maintained complementarity but were mismatched with respect to target (U:C, U:G, A:C, or A:G). Eighteen of these “UA-swap” duplexes were designed as part of the human/rhesus/mouse/rat set (see duplexes in Table 8 with “C19U”, “G19U”, “C19A”, or “G19A” labels in the Position column).

[0830] siRNA Design, Specificity, and Efficacy Prediction

[0831] The predicted specificity of all possible 19mers was predicted from each sequence. Candidate 19mers were then selected that lacked repeats longer than 7 nucleotides. These 1510 candidate human/rhesus, 114 human/rhesus/mouse/rat, and 717 mouse/rat siRNAs were used in comprehensive searches against the appropriate transcriptomes (defined as the set of NM_{—} and XM_records within the human, rhesus, dog, mouse, or rat NCBI Refseq sets) using an exhaustive “brute-force” algorithm implemented in the python script ‘BruteForce.py’. The script next parsed the transcript-oligo alignments to generate a score based on the position and number of mismatches between the siRNA and any potential ‘off-target’ transcript. The off-target score is weighted to emphasize differences in the ‘seed’ region of siRNAs, in positions 2-9 from the 5′ end of the molecule. Each oligo-transcript pair from the brute-force search was given a mismatch score by summing the individual mismatch scores; mismatches in the position 2-9 were counted as 2.8, mismatches in the cleavage site positions 10-11 were counted as 1.2, and mismatches in region 12-19 counted as 1.0. An additional off-target prediction was carried out by comparing the frequency of heptamers and octomers derived from 3 distinct, seed-derived hexamers of each oligo. The hexamers from positions 2-7 relative to the 5′ start is used to create 2 heptamers and one octomer. We create ‘heptamer1’ by adding a 3′ A to the hexamer; we create heptamer2 by adding a 5′ A to the hexamer; we create the octomer by adding an A to both 5′ and 3′ ends of the hexamer. The frequency of octomers and heptamers in the human, rhesus, mouse, or rat 3′UTRome (defined as the subsequence of the transcriptome from NCBI's Refseq database where the end of the coding region, the ‘CDS’, is clearly defined) was pre-calculated. The octomer frequency was normalized to the heptamer frequency using the median value from the range of octomer frequencies. A ‘mirSeedScore’ was then calculated by calculating the sum of ((3× normalized octomer count)+(2× heptamer2 count)+(1× heptamer1 count)).

[0832] Both siRNAs strands were assigned to a category of specificity according to the calculated scores: a score above 3 qualifies as highly specific, equal to 3 as specific and between 2.2 and 2.8 as moderately specific. We sorted by the specificity of the antisense strand. We then selected duplexes whose antisense oligos lacked GC at the first position, lacked G at both positions 13 and 14, and had 3 or more Us or As in the seed region (characteristics of duplexes with high predicted efficacy)

[0833] Candidate GalNac-conjugated duplexes, 21 and 23 nucleotides long on the sense and antisense strands respectively, were designed by extending antisense 19mers 4 additional nucleotides in the 3′ direction (preserving perfect complementarity with the target transcript). The sense strand was specified as the reverse complement of the first 21 nucleotides of the antisense 23mer. Duplexes were selected that maintained perfect matches to all selected species transcripts across all 23 nucleotides.

[0834] siRNA Sequence Selection

[0835] A total of 90 sense and 90 antisense derived human/rhesus, 40 sense and 40 antisense derived human/rhesus/mouse/mouse/rat, and 40 sense and 40 antisense derived mouse/rat siRNA 19mer oligos were synthesized and formed into duplexes. A total of 45 sense and 45 antisense derived human/rhesus 21/23mer oligos were synthesized to yield 45 GalNac-conjugated duplexes.

[0836] The sequences of the sense and antisense strands of the modified duplexes are shown in Table 2, and the sequences of the sense and antisense strands of the unmodified duplexes are shown in Table 3.

### Synthesis of ALAS1 Sequences

[0837] ALAS1 sequences were synthesized on MerMade 192 synthesizer at either 1 or 0.2 umol scale. Single strands were made with 2′O-methyl modifications for in vitro screening using transfection reagents. 3′ GalNAc conjugates were made with sequences containing 2′F and 2′-O-methyl modifications on the sense strand in the 21-23 mer designs for free uptake in cells. For all the 21mer sequences in the list, ‘endolight’ chemistry was applied as detailed below.
[0838] All pyrimidines (cytosine and uridine) in the sense strand contained 2′-O-Methyl bases (2′ O-Methyl C and 2′-O-Methyl U)
[0839] In the antisense strand, pyrimidines adjacent to (towards 5′ position) ribo A nucleoside were replaced with their corresponding 2-O-Methyl nucleosides
[0840] A two base dTsdT extension at 3′ end of both sense and anti sense sequences was introduced
[0841] The sequence file was converted to a text file to make it compatible for loading in the MerMade 192 synthesis software

[0842] For GalNAc conjugated sense strands and complementary antisense sequences, 2′F and other modified nucleosides were introduced in combination with ribo with 2′O-Methyl nucleosides. The synthesis was performed on a GalNAc modified CPG support for the sense strand and CPG modified with universal support on the antisense sequence.

[0843] Synthesis, Cleavage and Deprotection:

[0844] The synthesis of ALAS1 sequences used solid supported oligonucleotide synthesis using phosphoramidite chemistry. For 21 mer endolight sequences, a deoxy thymidine CPG was used as the solid support while for the GalNAc conjugates, GalNAc solid support for sense strand and an universal CPG for the antisesense strand were used.

[0845] The synthesis of the above sequences was performed at either 1 or 0.2 um scale in 96 well plates. The amidite solutions were prepared at 0.1M concentration and ethyl thio tetrazole (0.6M in Acetonitrile) was used as activator.

[0846] The synthesized sequences were cleaved and deprotected in 96 well plates, using methylamine in the first step and fluoride reagent in the second step. For GalNAc and 2′F nucleoside containing sequences, deprotection conditions were modified. Sequences after cleavage and deprotection were precipitated using acetone:ethanol (80:20) mix and the pellet were re-suspended in 0.2M sodium acetate buffer. Samples from each sequence were analyzed by LC-MS to confirm the identity, UV for quantification and a selected set of samples by IEX chromatography to determine purity.

[0847] Purification and Desalting:

[0848] ALAS1 sequences were precipitated and purified on AKTA Purifier system using Sephadex column. The ALAS less was run at ambient temperature. Sample injection and collection was performed in 96 well (1.8 mL-deep well) plates. A single peak corresponding to the full length sequence was collected in the eluent. The desalted ALAS1 sequences were analyzed for concentration (by UV measurement at A260) and purity (by ion exchange HPLC). The complementary single strands were then combined in a 1:1 stoichiometric ratio to form siRNA duplexes.

TABLE 2
Human ALAS1 Modified Single Strands and Duplex Sequences

| | SEQ ID | | | | |
|---|---|---|---|---|---|
| SEQ ID | NO: | Position on | | | |
| NO: | (anti- | transcript | | | |
| (sense) | sense) | NM_000688.4 | Duplex Name | Sense Sequence (5′-3′) | Antisense Sequence (5′-3′) |
| 2 | 3 | 522-540 | AD-55078.2 | cuccGGccAGuGAGAAAGAdTsdT | UCUUUCUcACUGGCCGGAGdTsdT |
| 4 | 5 | 669-687 | AD-55084.2 | uGGcAGcAcAGAuGAAucAdTsdT | UGAUUcAUCUGUGCUGCcAdTsdT |
| 6 | 7 | 790-808 | AD-55090.2 | cAGuGuGGuuAGuGuGAAAdTsdT | UUUcAcACuAACcAcACUGdTsdT |
| 8 | 9 | 853-871 | AD-55096.2 | cAucAuGcAAAAGcAAAGAdTsdT | UCUUUGCUUUUGcAUGAUGdTsdT |
| 10 | 11 | 876-894 | AD-55102.2 | AAAGAGuGucucAucuucudTsdT | AGAAGAUGAGAcACUCUUUdTsdT |
| 12 | 13 | 877-895 | AD-55106.2 | AAGAGuGucucAucuucuudTsdT | AAGAAGAUGAGAcACUCUUdTsdT |
| 14 | 15 | 914-932 | AD-55111.2 | ucuGuuuccAcuuuucAGudTsdT | ACUGAAAAGUGGAAAcAGAdTsdT |
| 16 | 17 | 923-941 | AD-55073.2 | AcuuuucAGuAuGAucGuudTsdT | AACGAUcAuACUGAAAAGUdTsdT |
| 18 | 19 | 926-944 | AD-55079.2 | uuucAGuAuGAucGuuucudTsdT | AGAAACGAUcAuACUGAAAdTsdT |
| 20 | 21 | 927-945 | AD-55085.2 | uucAGuAuGAucGuuucuudTsdT | AAGAAACGAUcAuACUGAAdTsdT |
| 22 | 23 | 928-946 | AD-55091.2 | ucAGuAuGAucGuuucuuudTsdT | AAAGAAACGAUcAuACUGAdTsdT |
| 24 | 25 | 932-950 | AD-55097.2 | uAuGAucGuuucuuuGAGAdTsdT | UCUcAAAGAAACGAUcAuAdTsdT |
| 26 | 27 | 973-991 | AD-55103.2 | uGAccAcAccuAucGAGuudTsdT | AACUCGAuAGGUGUGGUcAdTsdT |
| 28 | 29 | 975-993 | AD-55107.2 | AccAcAccuAucGAGuuuudTsdT | AAAACUCGAuAGGUGUGGUdTsdT |
| 30 | 31 | 1029-1047 | AD-55112.2 | uGGcAGAuGAcuAuucAGAdTsdT | UCUGAAuAGUcAUCUGCcAdTsdT |
| 32 | 33 | 1077-1095 | AD-55074.2 | ucuGGuGcAGuAAuGAcuAdTsdT | uAGUcAUuACUGcACcAGAdTsdT |
| 34 | 35 | 1124-1142 | AD-55080.2 | uGuGGGGcAGuuAuGGAcAdTsdT | UGUCcAuAACUGCCCcAcAdTsdT |
| 36 | 37 | 1137-1155 | AD-55086.2 | uGGAcAcuuuGAAAcAAcAdTsdT | UGUUGUUUcAAAGUGUCcAdTsdT |
| 38 | 39 | 1182-1200 | AD-55098.2 | AuAuuucuGGAAcuAGuAAdTsdT | UuACuAGUUCcAGAAAuAUdTsdT |
| 40 | 41 | 1184-1202 | AD-55104.2 | AuuucuGGAAcuAGuAAAudTsdT | AUUuACuAGUUCcAGAAAUdTsdT |
| 42 | 43 | 1185-1203 | AD-55108.2 | uuucuGGAAcuAGuAAAuudTsdT | AAUUuACuAGUUCcAGAAAdTsdT |
| 44 | 45 | 1188-1206 | AD-55113.2 | cuGGAAcuAGuAAAuuccAdTsdT | UGGAAUUuACuAGUUCcAGdTsdT |
| 46 | 47 | 1325-1343 | AD-55075.2 | uGuGAGAuuuAcucuGAuudTsdT | AAUcAGAGuAAAUCUcAcAdTsdT |
| 48 | 49 | 1364-1382 | AD-55081.2 | AuccAAGGGAuucGAAAcAdTsdT | UGUUUCGAAUCCCUUGGAUdTsdT |
| 50 | 51 | 1382-1400 | AD-55087.2 | AGccGAGuGccAAAGuAcAdTsdT | UGuACUUUGGcACUCGGCUdTsdT |
| 52 | 53 | 1478-1496 | AD-55093.2 | uuuGAAAcuGuccAuucAAdTsdT | UUGAAUGGAcAGUUUcAAAdTsdT |
| 54 | 55 | 1531-1549 | AD-55099.2 | uGAuGuGGcccAuGAGuuudTsdT | AAACUcAUGGGCcAcAUcAdTsdT |
| 56 | 57 | 1631-1649 | AD-53573.3 | GucAuGccAAAAAuGGAcAdTsdT | UGUCcAUUUUUGGcAUGACdTsdT |
| 58 | 59 | 1637-1655 | AD-55109.2 | ccAAAAAuGGAcAucAuuudTsdT | AAAUGAUGUCcAUUUUUGGdTsdT |
| 60 | 61 | 1706-1724 | AD-55114.2 | AcGAGuucucuGAuuGAcAdTsdT | UGUcAAUcAGAGAACUCGUdTsdT |
| 62 | 63 | 1962-1980 | AD-55076.2 | AAGucuGuGAuGAAcuAAudTsdT | AUuAGUUcAUcAcAGACUUdTsdT |
| 64 | 65 | 1967-1985 | AD-55082.2 | uGuGAuGAAcuAAuGAGcAdTsdT | UGCUcAUuAGUUcAUcAcAdTsdT |
| 66 | 67 | 1977-1995 | AD-55088.2 | uAAuGAGcAGAcAuAAcAudTsdT | AUGUuAUGUCUGCUcAUuAdTsdT |
| 68 | 69 | 2189-2207 | AD-55094.2 | uuuGAAGuGAuGAGuGAAAdTsdT | UUUcACUcAUcACUUcAAAdTsdT |
| 70 | 71 | 2227-2245 | AD-55100.2 | AGGcuuGAGcAAGuuGGuAdTsdT | uACcAACUUGCUcAAGCCUdTsdT |
| 72 | 73 | 2313-2331 | AD-55105.2 | ucuucAGAGuuGucuuuAudTsdT | AuAAAGAcAACUCUGAAGAdTsdT |
| 74 | 75 | 2317-2335 | AD-55110.2 | cAGAGuuGucuuuAuAuGudTsdT | AcAuAuAAAGAcAACUCUGdTsdT |
| 76 | 77 | 2319-2337 | AD-55115.2 | GAGuuGucuuuAuAuGuGAdTsdT | UcAcAuAuAAAGAcAACUCdTsdT |
| 78 | 79 | 2320-2338 | AD-55077.2 | AGuuGucuuuAuAuGuGAAdTsdT | UUcAcAuAuAAAGAcAACUdTsdT |
| 80 | 81 | 2344-2362 | AD-55083.2 | uuAuAuuAAAuuuuAAucudTsdT | AGAUuAAAAUUuAAuAuAAdTsdT |
| 82 | 83 | 2352-2370 | AD-55089.2 | AAuuuuAAucuAuAGuAAAdTsdT | UUuACuAuAGAUuAAAAUUdTsdT |
| 84 | 85 | 2353-2371 | AD-55095.2 | AuuuuAAucuAuAGuAAAAdTsdT | UUUuACuAuAGAUuAAAAUdTsdT |
| 86 | 87 | 2376-2394 | AD-55101.2 | AGuccuGGAAAuAAAuucudTsdT | AGAAUUuAUUUCcAGGACUdTsdT |
| 88 | 89 | 358-376 | AD-53511.1 | cuGcccAuucuuAucccGAdTsdT | UCGGGAuAAGAAUGGGcAGdTsdT |
| 90 | 91 | 789-807 | AD-53512.1 | ccAGuGuGGuuAGuGuGAAdTsdT | UUcAcACuAACcAcACUGGdTsdT |
| 92 | 93 | 1076-1094 | AD-53513.1 | GucuGGuGcAGuAAuGAcudTsdT | AGUcAUuACUGcACcAGACdTsdT |
| 94 | 95 | 1253-1271 | AD-53514.1 | GcAcucuuGuuuuccucGudTsdT | ACGAGGAAAAcAAGAGUGCdTsdT |
| 96 | 97 | 1544-1562 | AD-53515.1 | GAGuuuGGAGcAAucAccudTsdT | AGGUGAUUGCUCcAAACUCdTsdT |
| 98 | 99 | 2228-2246 | AD-53516.1 | GGcuuGAGcAAGuuGGuAudTsdT | AuACcAACUUGCUcAAGCCdTsdT |
| 100 | 101 | 404-422 | AD-53517.1 | GGcAAAucucuGuuGuucudTsdT | AGAAcAAcAGAGAUUUGCCdTsdT |
| 102 | 103 | 404-422 | AD-53517.1 | GGcAAAucucuGuuGuucudTsdT | AGAAcAAcAGAGAUUUGCCdTsdT |
| 104 | 105 | 866-884 | AD-53518.1 | cAAAGAccAGAAAGAGuGudTsdT | AcACUCUUUCUGGUCUUUGdTsdT |
| 106 | 107 | 1080-1098 | AD-53519.1 | GGuGcAGuAAuGAcuAccudTsdT | AGGuAGUcAUuACUGcACCdTsdT |
| 108 | 109 | 1258-1276 | AD-53520.1 | cuuGuuuuccucGuGcuuudTsdT | AAAGcACGAGGAAAAcAAGdTsdT |
| 110 | 111 | 1616-1634 | AD-53521.1 | GGGGAucGGGAuGGAGucAdTsdT | UGACUCcAUCCCGAUCCCCdTsdT |
| 112 | 113 | 2230-2248 | AD-53522.1 | cuuGAGcAAGuuGGuAucudTsdT | AGAuACcAACUUGCUcAAGdTsdT |
| 114 | 115 | 436-454 | AD-53523.1 | ccccAAGAuGAuGGAAGuudTsdT | AACUUCcAUcAUCUUGGGGdTsdT |
| 116 | 117 | 436-454 | AD-53523.1 | ccccAAGAuGAuGGAAGuudTsdT | AACUUCcAUcAUCUUGGGGdTsdT |
| 118 | 119 | 885-903 | AD-53524.1 | cucAucuucuucAAGAuAAdTsdT | UuAUCUUGAAGAAGAUGAGdTsdT |
| 120 | 121 | 1127-1145 | AD-53525.1 | GGGGcAGuuAuGGAcAcuudTsdT | AAGUGUCcAuAACUGCCCCdTsdT |
| 122 | 123 | 1315-1333 | AD-53526.1 | GAuGccAGGcuGuGAGAuudTsdT | AAUCUcAcAGCCUGGcAUCdTsdT |
| 124 | 125 | 1870-1888 | AD-53527.1 | GAGAcAGAuGcuAAuGGAudTsdT | AUCcAUuAGcAUCUGUCUCdTsdT |
| 126 | 127 | 2286-2304 | AD-53528.1 | ccccAGGccAuuAucAuAudTsdT | AuAUGAuAAUGGCCUGGGGdTsdT |
| 128 | 129 | 489-507 | AD-53529.1 | cAGcAGuAcAcuAccAAcAdTsdT | UGUUGGuAGUGuACUGCUGdTsdT |
| 130 | 131 | 489-507 | AD-53529.1 | cAGcAGuAcAcuAccAAcAdTsdT | UGUUGGuAGUGuACUGCUGdTsdT |
| 132 | 133 | 915-933 | AD-53530.1 | cuGuuuccAcuuuucAGuAdTsdT | uACUGAAAAGUGGAAAcAGdTsdT |
| 134 | 135 | 1138-1156 | AD-53531.1 | GGAcAcuuuGAAAcAAcAudTsdT | AUGUUGUUUcAAAGUGUCCdTsdT |
| 136 | 137 | 1324-1342 | AD-53532.1 | cuGuGAGAuuuAcucuGAudTsdT | AUcAGAGuAAAUCUcAcAGdTsdT |
| 138 | 139 | 1927-1945 | AD-53533.1 | cccuGuGcGGGuuGcAGAudTsdT | AUCUGcAACCCGcAcAGGGdTsdT |
| 140 | 141 | 2312-2330 | AD-53534.1 | GucuucAGAGuuGucuuuAdTsdT | uAAAGAcAACUCUGAAGACdTsdT |
| 142 | 143 | 646-664 | AD-53535.1 | cAcuGcAAGcAAAuGcccudTsdT | AGGGcAUUUGCUUGcAGUGdTsdT |
| 144 | 145 | 922-940 | AD-53536.1 | cAcuuuucAGuAuGAucGudTsdT | ACGAUcAuACUGAAAAGUGdTsdT |
| 146 | 147 | 1163-1181 | AD-53537.1 | GGGGcAGGuGGuAcuAGAAdTsdT | UUCuAGuACcACCUGCCCCdTsdT |
| 148 | 149 | 1347-1365 | AD-53538.1 | GGAAccAuGccuccAuGAudTsdT | AUcAUGGAGGcAUGGUUCCdTsdT |
| 150 | 151 | 1964-1982 | AD-53539.1 | GucuGuGAuGAAcuAAuGAdTsdT | UcAUuAGUUcAUcAcAGACdTsdT |
| 152 | 153 | 2321-2339 | AD-53540.1 | GuuGucuuuAuAuGuGAAudTsdT | AUUcAcAuAuAAAGAcAACdTsdT |
| 154 | 155 | 671-689 | AD-53541.1 | GcAGcAcAGAuGAAucAGAdTsdT | UCUGAUUcAUCUGUGCUGCdTsdT |
| 156 | 157 | 924-942 | AD-53542.1 | cuuuucAGuAuGAucGuuudTsdT | AAACGAUcAuACUGAAAAGdTsdT |
| 158 | 159 | 1164-1182 | AD-53543.1 | GGGcAGGuGGuAcuAGAAAdTsdT | UUUCuAGuACcACCUGCCCdTsdT |
| 160 | 161 | 1460-1478 | AD-53544.1 | GuccccAAGAuuGuGGcAudTsdT | AUGCcAcAAUCUUGGGGACdTsdT |
| 162 | 163 | 1976-1994 | AD-53545.1 | cuAAuGAGcAGAcAuAAcAdTsdT | UGUuAUGUCUGCUcAUuAGdTsdT |
| 164 | 165 | 786-804 | AD-53546.1 | GccccAGuGuGGuuAGuGudTsdT | AcACuAACcAcACUGGGGCdTsdT |
| 166 | 167 | 935-953 | AD-53547.1 | GAucGuuucuuuGAGAAAAdTsdT | UUUUCUcAAAGAAACGAUCdTsdT |
| 168 | 169 | 1165-1183 | AD-53548.1 | GGcAGGuGGuAcuAGAAAudTsdT | AUUUCuAGuACcACCUGCCdTsdT |
| 170 | 171 | 1530-1548 | AD-53549.1 | GuGAuGuGGcccAuGAGuudTsdT | AACUcAUGGGCcAcAUcACdTsdT |
| 172 | 173 | 2003-2021 | AD-53550.1 | cAAGcAAucAAuuAcccuAdTsdT | uAGGGuAAUUGAUUGCUUGdTsdT |
| 174 | 175 | 788-806 | AD-53551.1 | cccAGuGuGGuuAGuGuGAdTsdT | UcAcACuAACcAcACUGGGdTsdT |
| 176 | 177 | 974-992 | AD-53552.1 | GAccAcAccuAucGAGuuudTsdT | AAACUCGAuAGGUGUGGUCdTsdT |
| 178 | 179 | 1191-1209 | AD-53553.1 | GAAcuAGuAAAuuccAuGudTsdT | AcAUGGAAUUuACuAGUUCdTsdT |
| 180 | 181 | 1541-1559 | AD-53554.1 | cAuGAGuuuGGAGcAAucAdTsdT | UGAUUGCUCcAAACUcAUGdTsdT |
| 182 | 183 | 2075-2093 | AD-53555.1 | ccccAGAuGAuGAAcuAcudTsdT | AGuAGUUcAUcAUCUGGGGdTsdT |
| 184 | 185 | 360-378 | AD-53561.1 | GcccAuucuuAucccGAGudTsdT | ACUCGGGAuAAGAAUGGGCdTsdT |
| 186 | 187 | 1356-1374 | AD-53567.1 | ccuccAuGAuccAAGGGAudTsdT | AUCCCUUGGAUcAUGGAGGdTsdT |
| 188 | 189 | 1631-1649 | AD-53573.1 | GucAuGccAAAAAuGGAcAdTsdT | UGUCcAUUUUUGGcAUGACdTsdT |
| 190 | 191 | 1634-1652 | AD-53579.1 | AuGccAAAAAuGGAcAucAdTsdT | UGAUGUCcAUUUUUGGcAUdTsdT |

TABLE 3
Human ALAS1 Unmodified Single Strands and Duplex Sequences

| | SEQ ID NO: | Position on | | | |
|---|---|---|---|---|---|
| SEQ ID NO: | (anti- | transcript | | | |
| (sense) | sense) | NM_000688.4 | Duplex Name | Sense Sequence (5′-3′) | Antisense Sequence (5′-3′) |
| 192 | 193 | 522-540 | AD-55078.2 | CUCCGGCCAGUGAGAAAGA | UCUUUCUCACUGGCCGGAG |
| 194 | 195 | 669-687 | AD-55084.2 | UGGCAGCACAGAUGAAUCA | UGAUUCAUCUGUGCUGCCA |
| 196 | 197 | 790-808 | AD-55090.2 | CAGUGUGGUUAGUGUGAAA | UUUCACACUAACCACACUG |
| 198 | 199 | 853-871 | AD-55096.2 | CAUCAUGCAAAAGCAAAGA | UCUUUGCUUUUGCAUGAUG |
| 200 | 201 | 876-894 | AD-55102.2 | AAAGAGUGUCUCAUCUUCU | AGAAGAUGAGACACUCUUU |
| 202 | 203 | 877-895 | AD-55106.2 | AAGAGUGUCUCAUCUUCUU | AAGAAGAUGAGACACUCUU |
| 204 | 205 | 914-932 | AD-55111.2 | UCUGUUUCCACUUUUCAGU | ACUGAAAAGUGGAAACAGA |
| 206 | 207 | 923-941 | AD-55073.2 | ACUUUUCAGUAUGAUCGUU | AACGAUCAUACUGAAAAGU |
| 208 | 209 | 926-944 | AD-55079.2 | UUUCAGUAUGAUCGUUUCU | AGAAACGAUCAUACUGAAA |
| 210 | 211 | 927-945 | AD-55085.2 | UUCAGUAUGAUCGUUUCUU | AAGAAACGAUCAUACUGAA |
| 212 | 213 | 928-946 | AD-55091.2 | UCAGUAUGAUCGUUUCUUU | AAAGAAACGAUCAUACUGA |
| 214 | 215 | 932-950 | AD-55097.2 | UAUGAUCGUUUCUUUGAGA | UCUCAAAGAAACGAUCAUA |
| 216 | 217 | 973-991 | AD-55103.2 | UGACCACACCUAUCGAGUU | AACUCGAUAGGUGUGGUCA |
| 218 | 219 | 975-993 | AD-55107.2 | ACCACACCUAUCGAGUUUU | AAAACUCGAUAGGUGUGGU |
| 220 | 221 | 1029-1047 | AD-55112.2 | UGGCAGAUGACUAUUCAGA | UCUGAAUAGUCAUCUGCCA |
| 222 | 223 | 1077-1095 | AD-55074.2 | UCUGGUGCAGUAAUGACUA | UAGUCAUUACUGCACCAGA |
| 224 | 225 | 1124-1142 | AD-55080.2 | UGUGGGGCAGUUAUGGACA | UGUCCAUAACUGCCCCACA |
| 226 | 227 | 1137-1155 | AD-55086.2 | UGGACACUUUGAAACAACA | UGUUGUUUCAAAGUGUCCA |
| 228 | 229 | 1182-1200 | AD-55098.2 | AUAUUUCUGGAACUAGUAA | UUACUAGUUCCAGAAAUAU |
| 230 | 231 | 1184-1202 | AD-55104.2 | AUUUCUGGAACUAGUAAAU | AUUUACUAGUUCCAGAAAU |
| 232 | 233 | 1185-1203 | AD-55108.2 | UUUCUGGAACUAGUAAAUU | AAUUUACUAGUUCCAGAAA |
| 234 | 235 | 1188-1206 | AD-55113.2 | CUGGAACUAGUAAAUUCCA | UGGAAUUUACUAGUUCCAG |
| 236 | 237 | 1325-1343 | AD-55075.2 | UGUGAGAUUUACUCUGAUU | AAUCAGAGUAAAUCUCACA |
| 238 | 239 | 1364-1382 | AD-55081.2 | AUCCAAGGGAUUCGAAACA | UGUUUCGAAUCCCUUGGAU |
| 240 | 241 | 1382-1400 | AD-55087.2 | AGCCGAGUGCCAAAGUACA | UGUACUUUGGCACUCGGCU |
| 242 | 243 | 1478-1496 | AD-55093.2 | UUUGAAACUGUCCAUUCAA | UUGAAUGGACAGUUUCAAA |
| 244 | 245 | 1531-1549 | AD-55099.2 | UGAUGUGGCCCAUGAGUUU | AAACUCAUGGGCCACAUCA |
| 246 | 247 | 1631-1649 | AD-53573.3 | GUCAUGCCAAAAAUGGACA | UGUCCAUUUUUGGCAUGAC |
| 248 | 249 | 1637-1655 | AD-55109.2 | CCAAAAAUGGACAUCAUUU | AAAUGAUGUCCAUUUUUGG |
| 250 | 251 | 1706-1724 | AD-55114.2 | ACGAGUUCUCUGAUUGACA | UGUCAAUCAGAGAACUCGU |
| 252 | 253 | 1962-1980 | AD-55076.2 | AAGUCUGUGAUGAACUAAU | AUUAGUUCAUCACAGACUU |
| 254 | 255 | 1967-1985 | AD-55082.2 | UGUGAUGAACUAAUGAGCA | UGCUCAUUAGUUCAUCACA |
| 256 | 257 | 1977-1995 | AD-55088.2 | UAAUGAGCAGACAUAACAU | AUGUUAUGUCUGCUCAUUA |
| 258 | 259 | 2189-2207 | AD-55094.2 | UUUGAAGUGAUGAGUGAAA | UUUCACUCAUCACUUCAAA |
| 260 | 261 | 2227-2245 | AD-55100.2 | AGGCUUGAGCAAGUUGGUA | UACCAACUUGCUCAAGCCU |
| 262 | 263 | 2313-2331 | AD-55105.2 | UCUUCAGAGUUGUCUUUAU | AUAAAGACAACUCUGAAGA |
| 264 | 265 | 2317-2335 | AD-55110.2 | CAGAGUUGUCUUUAUAUGU | ACAUAUAAAGACAACUCUG |
| 266 | 267 | 2319-2337 | AD-55115.2 | GAGUUGUCUUUAUAUGUGA | UCACAUAUAAAGACAACUC |
| 268 | 269 | 2320-2338 | AD-55077.2 | AGUUGUCUUUAUAUGUGAA | UUCACAUAUAAAGACAACU |
| 270 | 271 | 2344-2362 | AD-55083.2 | UUAUAUUAAAUUUUAAUCU | AGAUUAAAAUUUAAUAUAA |
| 272 | 273 | 2352-2370 | AD-55089.2 | AAUUUUAAUCUAUAGUAAA | UUUACUAUAGAUUAAAAUU |
| 274 | 275 | 2353-2371 | AD-55095.2 | AUUUUAAUCUAUAGUAAAA | UUUUACUAUAGAUUAAAAU |
| 276 | 277 | 2376-2394 | AD-55101.2 | AGUCCUGGAAAUAAAUUCU | AGAAUUUAUUUCCAGGACU |
| 278 | 279 | 358-376 | AD-53511.1 | CUGCCCAUUCUUAUCCCGA | UCGGGAUAAGAAUGGGCAG |
| 280 | 281 | 789-807 | AD-53512.1 | CCAGUGUGGUUAGUGUGAA | UUCACACUAACCACACUGG |
| 282 | 283 | 1076-1094 | AD-53513.1 | GUCUGGUGCAGUAAUGACU | AGUCAUUACUGCACCAGAC |
| 284 | 285 | 1253-1271 | AD-53514.1 | GCACUCUUGUUUUCCUCGU | ACGAGGAAAACAAGAGUGC |
| 286 | 287 | 1544-1562 | AD-53515.1 | GAGUUUGGAGCAAUCACCU | AGGUGAUUGCUCCAAACUC |
| 288 | 289 | 2228-2246 | AD-53516.1 | GGCUUGAGCAAGUUGGUAU | AUACCAACUUGCUCAAGCC |
| 290 | 291 | 404-422 | AD-53517.1 | GGCAAAUCUCUGUUGUUCU | AGAACAACAGAGAUUUGCC |
| 292 | 293 | 404-422 | AD-53517.1 | GGCAAAUCUCUGUUGUUCU | AGAACAACAGAGAUUUGCC |
| 294 | 295 | 866-884 | AD-53518.1 | CAAAGACCAGAAAGAGUGU | ACACUCUUUCUGGUCUUUG |
| 296 | 297 | 1080-1098 | AD-53519.1 | GGUGCAGUAAUGACUACCU | AGGUAGUCAUUACUGCACC |
| 298 | 299 | 1258-1276 | AD-53520.1 | CUUGUUUUCCUCGUGCUUU | AAAGCACGAGGAAAACAAG |
| 300 | 301 | 1616-1634 | AD-53521.1 | GGGGAUCGGGAUGGAGUCA | UGACUCCAUCCCGAUCCCC |
| 302 | 303 | 2230-2248 | AD-53522.1 | CUUGAGCAAGUUGGUAUCU | AGAUACCAACUUGCUCAAG |
| 304 | 305 | 436-454 | AD-53523.1 | CCCCAAGAUGAUGGAAGUU | AACUUCCAUCAUCUUGGGG |
| 306 | 307 | 436-454 | AD-53523.1 | CCCCAAGAUGAUGGAAGUU | AACUUCCAUCAUCUUGGGG |
| 308 | 309 | 885-903 | AD-53524.1 | CUCAUCUUCUUCAAGAUAA | UUAUCUUGAAGAAGAUGAG |
| 310 | 311 | 1127-1145 | AD-53525.1 | GGGGCAGUUAUGGACACUU | AAGUGUCCAUAACUGCCCC |
| 312 | 313 | 1315-1333 | AD-53526.1 | GAUGCCAGGCUGUGAGAUU | AAUCUCACAGCCUGGCAUC |
| 314 | 315 | 1870-1888 | AD-53527.1 | GAGACAGAUGCUAAUGGAU | AUCCAUUAGCAUCUGUCUC |
| 316 | 317 | 2286-2304 | AD-53528.1 | CCCCAGGCCAUUAUCAUAU | AUAUGAUAAUGGCCUGGGG |
| 318 | 319 | 489-507 | AD-53529.1 | CAGCAGUACACUACCAACA | UGUUGGUAGUGUACUGCUG |
| 320 | 321 | 489-507 | AD-53529.1 | CAGCAGUACACUACCAACA | UGUUGGUAGUGUACUGCUG |
| 322 | 323 | 915-933 | AD-53530.1 | CUGUUUCCACUUUUCAGUA | UACUGAAAAGUGGAAACAG |
| 324 | 325 | 1138-1156 | AD-53531.1 | GGACACUUUGAAACAACAU | AUGUUGUUUCAAAGUGUCC |
| 326 | 327 | 1324-1342 | AD-53532.1 | CUGUGAGAUUUACUCUGAU | AUCAGAGUAAAUCUCACAG |
| 328 | 329 | 1927-1945 | AD-53533.1 | CCCUGUGCGGGUUGCAGAU | AUCUGCAACCCGCACAGGG |
| 330 | 331 | 2312-2330 | AD-53534.1 | GUCUUCAGAGUUGUCUUUA | UAAAGACAACUCUGAAGAC |
| 332 | 333 | 646-664 | AD-53535.1 | CACUGCAAGCAAAUGCCCU | AGGGCAUUUGCUUGCAGUG |
| 334 | 335 | 922-940 | AD-53536.1 | CACUUUUCAGUAUGAUCGU | ACGAUCAUACUGAAAAGUG |
| 336 | 337 | 1163-1181 | AD-53537.1 | GGGGCAGGUGGUACUAGAA | UUCUAGUACCACCUGCCCC |
| 338 | 339 | 1347-1365 | AD-53538.1 | GGAACCAUGCCUCCAUGAU | AUCAUGGAGGCAUGGUUCC |
| 340 | 341 | 1964-1982 | AD-53539.1 | GUCUGUGAUGAACUAAUGA | UCAUUAGUUCAUCACAGAC |
| 342 | 343 | 2321-2339 | AD-53540.1 | GUUGUCUUUAUAUGUGAAU | AUUCACAUAUAAAGACAAC |
| 344 | 345 | 671-689 | AD-53541.1 | GCAGCACAGAUGAAUCAGA | UCUGAUUCAUCUGUGCUGC |
| 346 | 347 | 924-942 | AD-53542.1 | CUUUUCAGUAUGAUCGUUU | AAACGAUCAUACUGAAAAG |
| 348 | 349 | 1164-1182 | AD-53543.1 | GGGCAGGUGGUACUAGAAA | UUUCUAGUACCACCUGCCC |
| 350 | 351 | 1460-1478 | AD-53544.1 | GUCCCCAAGAUUGUGGCAU | AUGCCACAAUCUUGGGGAC |
| 352 | 353 | 1976-1994 | AD-53545.1 | CUAAUGAGCAGACAUAACA | UGUUAUGUCUGCUCAUUAG |
| 354 | 355 | 786-804 | AD-53546.1 | GCCCCAGUGUGGUUAGUGU | ACACUAACCACACUGGGGC |
| 356 | 357 | 935-953 | AD-53547.1 | GAUCGUUUCUUUGAGAAAA | UUUUCUCAAAGAAACGAUC |
| 358 | 359 | 1165-1183 | AD-53548.1 | GGCAGGUGGUACUAGAAAU | AUUUCUAGUACCACCUGCC |
| 360 | 361 | 1530-1548 | AD-53549.1 | GUGAUGUGGCCCAUGAGUU | AACUCAUGGGCCACAUCAC |
| 362 | 363 | 2003-2021 | AD-53550.1 | CAAGCAAUCAAUUACCCUA | UAGGGUAAUUGAUUGCUUG |
| 364 | 365 | 788-806 | AD-53551.1 | CCCAGUGUGGUUAGUGUGA | UCACACUAACCACACUGGG |
| 366 | 367 | 974-992 | AD-53552.1 | GACCACACCUAUCGAGUUU | AAACUCGAUAGGUGUGGUC |
| 368 | 369 | 1191-1209 | AD-53553.1 | GAACUAGUAAAUUCCAUGU | ACAUGGAAUUUACUAGUUC |
| 370 | 371 | 1541-1559 | AD-53554.1 | CAUGAGUUUGGAGCAAUCA | UGAUUGCUCCAAACUCAUG |
| 372 | 373 | 2075-2093 | AD-53555.1 | CCCCAGAUGAUGAACUACU | AGUAGUUCAUCAUCUGGGG |
| 374 | 375 | 360-378 | AD-53561.1 | GCCCAUUCUUAUCCCGAGU | ACUCGGGAUAAGAAUGGGC |
| 376 | 377 | 1356-1374 | AD-53567.1 | CCUCCAUGAUCCAAGGGAU | AUCCCUUGGAUCAUGGAGG |
| 378 | 379 | 1631-1649 | AD-53573.1 | GUCAUGCCAAAAAUGGACA | UGUCCAUUUUUGGCAUGAC |
| 380 | 381 | 1634-1652 | AD-53579.1 | AUGCCAAAAAUGGACAUCA | UGAUGUCCAUUUUUGGCAU |

### Example 3

### In Vitro Screening of ALAS1 siRNA Duplexes for ALAS1 Knockdown Activity

[0849] ALAS1 siRNA duplexes were screened for the ability to knockdown ALAS1 expression in vitro.

### In Vitro Screening

[0850] Cell Culture and Transfections

[0851] Hep3B cells (ATCC, Manassas, Va.) were grown to near confluence at 37° C. in an atmosphere of 5% CO₂ in MEM (ATCC) supplemented with 10% FBS, before being released from the plate by trypsinization. Transfection was carried out by adding 14.8 μl of Opti-MEM plus 0.2 μl of Lipofectamine RNAiMax per well (Invitrogen, Carlsbad Calif. cat #13778-150) to 5 μl of siRNA duplexes per well into a 96-well plate and incubated at room temperature for 15 minutes. 80 μl of complete growth media containing ˜2×10⁴ Hep3B cells were then added to the siRNA mixture. Cells were incubated for either 24 or 120 hours prior to RNA purification. Single dose experiments were performed at 10 nM and 0.1 nM final duplex concentration and dose response experiments were done at 10, 1.67, 0.27, 0.046, 0.0077, 0.0013, 0.00021, 0.00004 nM final duplex concentration.

[0852] Total RNA Isolation Using DYNABEADS mRNA Isolation Kit (Invitrogen, Part #: 610-12)

[0853] Cells were harvested and lysed in 150 μl of Lysis/Binding Buffer then mixed for 5 minutes at 850 rpm using an Eppendorf Thermomixer (the mixing speed was the same throughout the process). Ten microliters of magnetic beads and 80 μl Lysis/Binding Buffer mixture were added to a round bottom plate and mixed for 1 minute. Magnetic beads were captured using magnetic stand and the supernatant was removed without disturbing the beads. After removing supernatant, the lysed cells were added to the remaining beads and mixed for 5 minutes. After removing supernatant, magnetic beads were washed 2 times with 150 μl Wash Buffer A and mixed for 1 minute. Beads were captured again and supernatant removed. Beads were then washed with 150 μl Wash Buffer B, captured and supernatant was removed. Beads were next washed with 150 μl Elution Buffer, captured and supernatant removed. Beads were allowed to dry for 2 minutes. After drying, 50 μl of Elution Buffer was added and mixed for 5 minutes at 70° C. Beads were captured on magnet for 5 minutes. 40 μl of supernatant was removed and added to another 96 well plate.

[0854] cDNA Synthesis Using ABI High Capacity cDNA Reverse Transcription Kit (Applied Biosystems, Foster City, Calif., Cat #4368813)

[0855] A master mix of 2 μl 10× Buffer, 0.8 μl 25×dNTPs, 2 μl Random primers, 1 μl Reverse Transcriptase, 1 μl RNase inhibitor and 3.2 μl of H₂O per reaction were added into 10 μl total RNA. cDNA was generated using a Bio-Rad C-1000 or S-1000 thermal cycler (Hercules, Calif.) through the following steps: 25° C. 10 min, 37° C. 120 min, 85° C. 5 sec, 4° C. hold.

[0856] Real Time PCR

[0857] 2 μl of cDNA were added to a master mix containing 0.5 μl GAPDH TaqMan Probe (Applied Biosystems Cat #4326317E), 0.5 μl ALAS1 TaqMan probe (Applied Biosystems cat # Hs00167441_m1) and 5 μl Lightcycler 480 probe master mix (Roche Cat #04887301001) per well in a 384 well plates (Roche cat #04887301001). Real time PCR was done in a Roche LC480 Real Time PCR system (Roche) using the ΔΔCt(RQ) assay. Each duplex was tested in two independent transfections with two biological replicates each, and each transfection was assayed in duplicate, unless otherwise noted in the summary tables.

[0858] To calculate relative fold change, real time data were analyzed using the ΔΔCt method and normalized to assays performed with cells transfected with 10 nM AD-1955, or mock transfected cells. IC50s were calculated using a 4 parameter fit model using XLFit and normalized to cells transfected with AD-1955 or naïve cells over the same dose range, or to its own lowest dose.

In Vitro Knockdown of Endogenous ALAS1 Expression by ALAS1 siRNA Duplexes

[0859] Table 4 illustrates the knockdown of ALAS1 in Hep3B cells by ALAS1 modified siRNA duplexes (See Table 2). Silencing is expressed as the fraction RNA message remaining relative to the negative (luciferase) control siRNA AD-1955. Data were generated as described above following transfection of 10 nM or 0.1 nM of each siRNA. qPCR was run using the ALAS1 TaqMan probe Hs00167441_m1.

TABLE 4
ALAS1 expression in Hep3B cells following
transfection with ALAS1 siRNA

| | 10 nM | 0.1 nM | 10 nM | 0.1 nM |
|---|---|---|---|---|
| Duplex ID | Avg | Avg | STDEV | STDEV |
| AD-55078.2 | 0.7 | 0.87 | 0.001 | 0.089 |
| AD-55084.2 | 0.08 | 0.3 | 0 | 0.04 |
| AD-55090.2 | 0.06 | 0.08 | 0.002 | 0.003 |
| AD-55096.2 | 0.61 | 0.92 | 0.171 | 0.34 |
| AD-55102.2 | 0.63 | 0.62 | 0.005 | 0.069 |
| AD-55106.2 | 0.07 | 0.08 | 0.004 | 0.027 |
| AD-55111.2 | 0.06 | 0.23 | 0.013 | 0.062 |
| AD-55073.2 | 0.21 | 0.4 | 0.018 | 0.061 |
| AD-55079.2 | 0.17 | 0.43 | 0.033 | 0.089 |
| AD-55085.2 | 0.13 | 0.21 | 0.011 | 0.019 |
| AD-55091.2 | 0.27 | 0.55 | 0.033 | 0.009 |
| AD-55097.2 | 0.31 | 0.38 | 0.051 | 0.059 |
| AD-55103.2 | 0.05 | 0.11 | 0.017 | 0.006 |
| AD-55107.2 | 0.12 | 0.24 | 0.007 | 0.008 |
| AD-55112.2 | 0.15 | 0.2 | 0.036 | 0.025 |
| AD-55074.2 | 0.16 | 0.45 | 0.008 | 0.002 |
| AD-55080.2 | 0.79 | 0.99 | 0.095 | 0.304 |
| AD-55086.2 | 0.09 | 0.22 | 0.005 | 0.035 |
| AD-55098.2 | 0.25 | 0.51 | 0.03 | 0.07 |
| AD-55104.2 | 0.06 | 0.1 | 0.017 | 0.001 |
| AD-55108.2 | 0.47 | 0.65 | 0.03 | 0.015 |
| AD-55113.2 | 0.38 | 0.62 | 0.068 | 0.039 |
| AD-55075.2 | 0.12 | 0.28 | 0.007 | 0.051 |
| AD-55081.2 | 0.21 | 0.51 | 0.036 | 0.066 |
| AD-55087.2 | 0.1 | 0.19 | 0.017 | 0.02 |
| AD-55093.2 | 0.24 | 0.56 | 0.029 | 0.053 |
| AD-55099.2 | 0.05 | 0.18 | 0.001 | 0.038 |
| AD-53573.3 | 0.67 | 1.07 | 0.16 | 0.153 |
| AD-55109.2 | 0.07 | 0.23 | 0.006 | 0.052 |
| AD-55114.2 | 0.08 | 0.16 | 0.004 | 0.017 |
| AD-55076.2 | 0.05 | 0.14 | 0.007 | 0.035 |
| AD-55082.2 | 0.08 | 0.3 | 0.019 | 0.016 |
| AD-55088.2 | 0.06 | 0.12 | 0.008 | 0.02 |
| AD-55094.2 | 0.06 | 0.18 | 0.005 | 0.023 |
| AD-55100.2 | 0.45 | 0.83 | 0.02 | 0.05 |
| AD-55105.2 | 0.02 | 0.05 | 0.005 | 0.004 |
| AD-55110.2 | 0.15 | 0.19 | 0.031 | 0.016 |
| AD-55115.2 | 0.35 | 0.58 | 0.045 | 0.052 |
| AD-55077.2 | 0.14 | 0.14 | 0.006 | 0.019 |
| AD-55083.2 | 0.56 | 0.98 | 0.24 | 0.188 |
| AD-55089.2 | 0.62 | 0.79 | 0.036 | 0.094 |
| AD-55095.2 | 0.59 | 0.92 | 0.12 | 0.079 |
| AD-55101.2 | 0.71 | 0.97 | 0.074 | 0.097 |
| AD-1955 | 1.00 | 1.01 | 0.03 | 0.04 |
| AD-53511.1 | 0.84 | 1.08 | 0.028 | 0.0515 |
| AD-53512.1 | 0.15 | 0.65 | 0.062 | 0.023 |
| AD-53513.1 | 0.34 | 0.86 | 0.055 | 0.011 |
| AD-53514.1 | 0.12 | 0.61 | 0.003 | 0.008 |
| AD-53515.1 | 0.25 | 0.66 | 0.005 | 0.004 |
| AD-53516.1 | 1.05 | 1.02 | 0.032 | 0.011 |
| AD-53517.1 | 0.145 | 0.725 | 0.025 | 0.0155 |
| AD-53518.1 | 0.72 | 0.85 | 0.045 | 0.028 |
| AD-53519.1 | 0.18 | 0.66 | 0.061 | 0.004 |
| AD-53520.1 | 0.18 | 0.9 | 0.041 | 0.001 |
| AD-53521.1 | 0.97 | 1.07 | 0.01 | 0.003 |
| AD-53522.1 | 0.87 | 1.1 | 0.065 | 0.112 |
| AD-53523.1 | 0.48 | 0.96 | 0.0305 | 0.0255 |
| AD-53524.1 | 0.11 | 0.66 | 0.02 | 0.006 |
| AD-53525.1 | 0.71 | 1.03 | 0.016 | 0.01 |
| AD-53526.1 | 0.23 | 0.85 | 0.075 | 0.01 |
| AD-53527.1 | 0.25 | 0.83 | 0.015 | 0.017 |
| AD-53528.1 | 0.44 | 0.93 | 0.037 | 0.006 |
| AD-53529.1 | 0.185 | 0.73 | 0.015 | 0.014 |
| AD-53530.1 | 0.1 | 0.62 | 0.02 | 0.003 |
| AD-53531.1 | 0.48 | 0.93 | 0.019 | 0.045 |
| AD-53532.1 | 0.06 | 0.17 | 0 | 0.003 |
| AD-53533.1 | 0.36 | 0.93 | 0.025 | 0.034 |
| AD-53534.1 | 0.1 | 0.36 | 0.014 | 0.012 |
| AD-53535.1 | 0.58 | 1.05 | 0.036 | 0.071 |
| AD-53536.1 | 0.12 | 0.45 | 0.009 | 0.026 |
| AD-53537.1 | 0.73 | 0.96 | 0.101 | 0.015 |
| AD-53538.1 | 0.74 | 1.07 | 0 | 0.046 |
| AD-53539.1 | 0.52 | 0.97 | 0.057 | 0.032 |
| AD-53540.1 | 0.1 | 0.47 | 0.017 | 0.012 |
| AD-53541.1 | 0.11 | 0.29 | 0.026 | 0.015 |
| AD-53542.1 | 0.08 | 0.23 | 0.008 | 0.006 |
| AD-53543.1 | 0.62 | 1.01 | 0.027 | 0.014 |
| AD-53544.1 | 0.8 | 1.04 | 0.002 | 0.001 |
| AD-53545.1 | 0.17 | 0.73 | 0.007 | 0.007 |
| AD-53546.1 | 0.27 | 0.93 | 0.058 | 0.019 |
| AD-53547.1 | 0.12 | 0.28 | 0.008 | 0.01 |
| AD-53548.1 | 0.1 | 0.34 | 0.022 | 0.002 |
| AD-53549.1 | 0.8 | 1.04 | 0.011 | 0.026 |
| AD-53550.1 | 0.05 | 0.54 | 0.02 | 0.003 |
| AD-53551.1 | 0.96 | 1.16 | 0.029 | 0.044 |
| AD-53552.1 | 0.13 | 0.5 | 0.002 | 0.009 |
| AD-53553.1 | 0.92 | 1.1 | 0.027 | 0.02 |
| AD-53554.1 | 0.76 | 0.67 | 0.005 | 0.004 |
| AD-53555.1 | 0.11 | 0.53 | 0.009 | 0.007 |
| AD-53561.1 | 0.72 | 0.94 | 0.014 | 0.001 |
| AD-53567.1 | 0.16 | 0.66 | 0.019 | 0.003 |
| AD-53573.1 | 1.06 | 1.10 | 0.019 | 0.037 |
| AD-53579.1 | 0.19 | 0.76 | 0.036 | 0.019 |

IC₅₀s of Select ALAS1 siRNA Duplexes in In Vitro Screen

[0860] Table 5 illustrates the IC₅₀s of select ALAS1 siRNA duplexes determined from the knockdown of endogenously expressed ALAS1 in the Hep3B cell line, by ALAS1 modified siRNA duplexes (see Table 2). Data were generated as described above, at 24 or 120 hours following transfection of each siRNA duplex. In this example, silencing of ALAS1 is expressed as the fraction mRNA message remaining relative to the siRNA AD-1955, a non-targeting siRNA that was used as a negative control. Data from replicate transfection experiments were used to fit a single line to determine the IC₅₀. Several of the duplexes (e.g., AD-53541.1, AD-53542.1, and AD-53547.1) had an IC₅₀ as low as about 0.03 nM at 24 hours. Numerous duplexes had an IC₅₀ of less than 0.1 nM (e.g., AD-53534.1, AD-53536.1, AD-53540.1, AD-53541.1, AD-53542.1, AD-53547.1, AD-53548.1, AD-53550.1, AD-53552.1) at 24 hours, and some of these also had an IC₅₀ of less than 0.1 nM (e.g., AD-53534.1, AD-53540.1, AD-53541.1, AD-53542.1, AD-53547.1, AD-53552.1) at 120 hours.

TABLE 5
IC₅₀s of select ALAS1 siRNA duplexes normalized to AD-1955

IC50 (nM)

| DUPLEX ID | 24 hrs | 120 hrs |
|---|---|---|
| AD-53534.1 | 0.045 | 0.076 |
| AD-53536.1 | 0.049 | 0.105 |
| AD-53540.1 | 0.054 | 0.077 |
| AD-53541.1 | 0.032 | 0.062 |
| AD-53542.1 | 0.028 | 0.093 |
| AD-53547.1 | 0.03 | 0.062 |
| AD-53548.1 | 0.044 | 0.101 |
| AD-53550.1 | 0.085 | 0.152 |
| AD-53552.1 | 0.077 | 0.063 |
| AD-53567.1 | 0.219 | 0.357 |
| AD-53579.1 | 0.217 | 0.566 |

### Example 4

### In Vivo Silencing Using a Mouse/Rat ALAS1 siRNA Formulated as a LNP

[0861] The sequences of the modified duplex AD-53558 are shown in Table 6 below.

TABLE 6
Sequences of ALAS1 siRNA Duplex AD-53558.4

| | SEQ | | | | |
|---|---|---|---|---|---|
| | ID | | | | |
| SEQ ID | NO: | Start Position on | | | |
| NO: | (anti- | transcript of | | | |
| (sense) | sense) | NM_020559.2 | Duplex Name | Sense Sequence (5′-3′) | Antisense Sequence (5′-3′) |
| 383 | 384 | 1184 | AD-53558 | cuGuGAAAuuuAcucuGAudTsdT | AUcAGAGuAAAUUUcAcAGdTsdT |

[0862] This duplex was formulated as a LNP11 formulation (see Table 10 above). The LNP-formulated AD-53558 siRNA was tested in in vivo in mice (N=25 animals; 5 animals per group) and rats (N=20 animals; 4 animals per group) and was confirmed to silence ALAS1 mRNA in vivo. The results are shown in FIG. 5 and FIG. 6.

[0863] FIG. 5 shows that the siRNA demonstrated a dose-response effect in mice. The expression of mouse ALAS1 (mALAS1) mRNA was reduced by about 78% when the siRNA was administered at 1 mg/kg; mouse ALAS1 mRNA was reduced by about 60% when the siRNA was administered at 0.3 mg/kg; and mouse ALAS1 mRNA was reduced by about 49% when the siRNA was administered at 0.1 mg/kg. These reductions are expressed relative to a PBS control. An AD-1955 LUC control was also employed, as shown in FIG. 5.

[0864] Similarly, FIG. 6 shows that the siRNA demonstrated a dose-response effect in rats. The expression of ALAS1 RNA was reduced by about 70% when the when the siRNA was administered at 1 mg/kg; ALAS1 mRNA was reduced by about 62% when the siRNA was administered at 0.3 mg/kg; and ALAS1 mRNA was reduced by about 34% when the siRNA was administered at 0.1 mg/kg.

[0865] The durability of silencing was also tested in mice (N=15; 3 animals per timepoint. The results are shown in FIG. 7, which shows that AD-53558 suppressed mALAS1 mRNA by about 80% for at least 9 days. Suppression of at least about 50% persisted for at least 14 days.

### Example 5

### Efficacy of ALAS1 siRNA in an Animal Model of AIP

[0866] The effects of the AD-53558 LNP11 formulation (a mouse/rat ALAS1 siRNA described in the previous example) were investigated in a mouse model of AIP. The PBGD knockout is not viable (−/−, 0% activity). Heterozygous PBGD knockout mice (+/−, ˜50% activity) are available but do not have the full biochemical phenotype and thus do not recapitulate the human disease phenotype. Thus, a mouse model of AIP has been developed that is a compound heterozygote with T1/T2 alleles, including T1 (+/−) promoter disruption and T2 (−/−) splice-site alteration. These mice have been shown to have hepatic residual PBGD activity that is about ˜30% of the wild-type level and normal or slightly elevated baseline plasma ALA and PBG levels. The mice have been found to appear normal early in life and to become slightly slower and ataxic with age. By six months of age, the mice have been documented to develop impaired motor coordination and muscular performance and axonal degeneration on pathological examination. Investigation of the pathology of the mouse model has shown axonal degeneration, impaired motor coordination and muscular performance in older mice. Urinary and plasma ALA and PBG have been found to markedly increase with serial i.p. administration of phenobarbital (see Lindberg et al., (1996), Nature Genetics, 12:195-219 and Lindberg et al., (1999), Journal of Clinical Investigation, 103:1127-34). The mice were rescued by AAV-mediated expression of PBGD in the liver (Yasuda et al. (2010), Molecular Medicine, 1:17-22 and Unzu et al. (2011), Molecular Medicine, 2:243-50).

[0867] On day 1, the mice were administered 1 mg/kg ALAS1 siRNA (n=5) or LUC AD-1955 control (n=3) by i.v. injection. Three phenobarbital injections were given (1 injection per day on days 2, 3, and 4) to induce hepatic ALAS1 and the porphyrin precursors, ALA and PBG. Plasma and overnight urine specimens were collected on day 5 and metabolite levels were measured by LC-MS. Metabolite levels were measured in plasma by LC-MS and were also measured in urine. Baseline levels of metabolites were measured prior to the first treatment on day 1. The results are shown in FIGS. 8-12 and in Tables 12 and 13.

[0868] FIG. 8 and FIG. 9 show the plasma ALA levels in μM. Baseline ALA levels were low, (n=4), and phenobarbital treatment induced significant increases in plasma ALA levels in the control LUC siRNA treated animals (n=3). Treatment with ALAS1 siRNA inhibited the induction of plasma ALA (n=5), as shown in FIG. 8. The ALAS1 siRNA was consistently effective in blocking the induction of plasma ALA in each of the individual animals studied (see FIG. 9). These results indicate that ALAS1 siRNA treatment was effective in preventing the increases in plasma ALA associated with the phenobarbital-induced acute attacks in this AIP animal model.

[0869] FIG. 10 and FIG. 11 show the plasma PBG levels in μM. Baseline PBG levels were low (n=4), and phenobarbital treatment induced significant increases in plasma PBG levels in the control LUC siRNA treated animals (n=3) Treatment with ALAS1 siRNA inhibited the induction of plasma PBG (n=5), as shown in FIG. 10. The ALAS1 siRNA was consistently effective in blocking the induction of plasma PBG in each of the individual animals studied (see FIG. 11). These results indicate that ALAS1 siRNA treatment was effective in preventing the increases in plasma PBG associated with the phenobarbital-induced acute attacks in this AIP animal model.

[0870] Tables 12 and 13 shows urine ALA and PBG levels at baseline and after phenobarbital treatment in LUC siRNA (n=2) control (CTR, which refers to a PBS buffer treated animal, n=1) and ALAS1 siRNA (n=5) treated animals.

TABLE 12
Urine data from individual animals showing prevention of induced acute attack

| | ALA | PBG | | ALA | PBG | | |
|---|---|---|---|---|---|---|---|
| | (micro | (micro | Creatinine | (microM/mg | (microM/mg | | |
| Mouse ID | M/l) | M/L) | (mg/dl) | creatinine) | creatinine) | siRNA | PB |
| Ha-17-4-6 | | | | 29.7 | 7.9 | Baseline | — |
| Ha-19-5-4/2 | | | | 15.7 | 5.1 | Baseline | — |
| Ha-20-39-4/3 | | | | 28.6 | 6.7 | Baseline | — |
| Ha-20-38-4 | | | | 21.4 | 4.7 | Baseline | — |
| Ha-21-33-4 | 934.92 | 483.71 | 0.4205 | 222.33 | 115.03 | Luc | + |
| Ha-21-36-9 | 944.08 | 563.53 | 0.5055 | 186.76 | 111.48 | Luc | + |
| Ha-21-18-8 | 32.88 | 8.69 | 0.133 | 24.72 | 6.53 | ALAS1; | + |
| | | | | | | 1 mg/kg | |
| Ha-21-33-7 | 83.07 | 23.28 | 0.426 | 19.50 | 5.46 | ALAS1; | + |
| | | | | | | 1 mg/kg | |
| Ha-21-34-5 | 59.15 | 18.41 | 0.263 | 22.49 | 7.00 | ALAS1; | + |
| | | | | | | 1 mg/kg | |

PB stands for phenobarbital.
A “+” indicates that phenobarbital was administered.

TABLE 13
Average Urine Data

| | Mean ALA | Mean PBG |
|---|---|---|
| Condition | (microM/mg creatinine) | (microM/mg creatinine) |
| AIP Baseline | 23.8 | 6.1 |
| Luc-siRNA | 204.55 | 113.26 |
| ALAS1-siRNA | 22.24 | 6.33 |

[0871] Phenobarbital treatment induced strong increases (˜25-30 fold increases) in urine ALA (˜9-fold over baseline levels) and PBG (˜19-fold over baseline levels) in the LUC siRNA treated mice, control, whereas such increases were not observed in the ALAS1 siRNA treated animals. Thus, ALAS1 siRNA blocked phenobarbital-induced increases in urinary ALA and PBG. These results are consistent with the plasma measurements and show that ALAS1 siRNA treatment was effective in preventing increases in urinary metabolites (ALA and PBG) associated with the phenobarbital-induced acute attacks in this AIP animal model.

[0872] In further experiments (FIG. 12), it was found that phenobarbital treatment induced large increases (˜25 fold) in ALAS1 mRNA expression in the liver of the mouse model. Administration of ALAS1 siRNA completely blocked this ALAS1 mRNA induction. These results provide further evidence that ALAS1 siRNA is effective in an animal model of AIP.

[0873] Collectively, the results provided in this Example show that ALAS1 siRNA was effective in treating acute attacks in an animal model of the acute hepatic porphyria AIP. Multiple outcome measures support this conclusion, including plasma ALA levels, plasma PBG levels, urine ALA levels, urine PBG levels, and liver ALAS1 mRNA expression levels.

### Example 6

### In Vivo Silencing Using GalNAc-Conjugated Mouse ALAS1 siRNA

[0874] The experiments described in this example investigated the in vivo efficacy of three GalNAc-conjugated siRNAs (see Table 7). These siRNAs were designed and produced with methods such as those described in Example 2.

TABLE 7
Sequences AD-57929

| | | | | | | Position |
|---|---|---|---|---|---|---|
| | | | | | | of |
| | SEQ | Position | | | | antisense |
| SEQ | ID | of sense | | | | seq. |
| ID | NO: | seq. on | | | | on |
| NO: | (anti- | transcript | Duplex | | | transcript |
| (sense) | sense) | NM_020559.2 | Name | Sense Sequence (5′-3′) | Antisense Sequence (5′-3′) | NM_020559.2 |
| 385 | 386 | 775-795 | AD- | AfaGfuCfuGfuUfUfCfcAfcUfuUfuCfa | uUfgAfaAfaGfuGfgaaAfcAfg | 773-795 |
| | | | 56211 | AfL96 | AfcUfusUfsg | |
| 387 | 388 | 2168-2188 | AD- | AfcAfuAfgUfaGfCfCfaGfaAfuUfgUfc | aGfaCfaAfuUfcUfggcUfaCfu | 2166-2188 |
| | | | 56173 | UfL96 | AfuGfusGfsg | |
| 389 | 390 | 775-795 | AD- | AfsasGfuCfuGfuUfUfCfcAfcUfuUfuCf | usUfsgAfaAfaGfuGfgaaAfc | 773-795 |
| | | | 57929 | aAfL96 | AfgAfcUfususg | |

[0875] The mice (n=40; n=4 per experimental condition) were divided into groups that received PBS or doses of 3 mg/kg, 10 mg/kg, or 30 mg/kg of siRNA administered subcutaneously. The level of mALAS1/mGAPDH mRNA, relative to the PBS control, was determined in liver cells at 72 hours post-administration. The results are shown in FIG. 13. There was not a clear dose-response effect for the siRNAs AD-56211 and AD-56173. In contrast, the ALAS1 siRNA AD-57929 showed a dose-response effect in inhibiting mALAS1 expression. These results demonstrate that an ALAS1 GalNAc conjugate was effective in inhibiting expression of ALAS1 mRNA in vivo and showed a dose-response effect.

### Example 7

### Human siRNAs

[0876] Additional human siRNAs were designed and produced as described in Example 2. The top 45 siRNAs were selected based on their predicted efficacy. The sequences of these 45 siRNAs are provided in Table 8 and the Sequence Listing attached herewith (e.g., a sense sequence corresponding to one of the odd numbered sequences identified as SEQ ID NOs: 391 to 551, and an antisense sequence corresponding to one of the even numbered sequences identified as SEQ ID NOs: 392 to 552, respectively). Table 8 is disclosed in International Publication No. WO2013/155204A2. The contents of WO 2013/155204 and the Sequence Listing, including Table 8, are expressly incorporated by reference.

### Example 8

### Human siRNAs

[0877] Additional 19mer human siRNAs were generated. The sequences of these siRNAs are provided in Table 9 and the Sequence Listing attached herewith (e.g., a sense sequence corresponding to one of the odd numbered sequences identified as SEQ ID NOs: 553 to 3365, and an antisense sequence corresponding to one of the even numbered sequences identified as SEQ ID NOs: 554 to 3366, respectively). Table 9 is disclosed in International Publication No. WO2013/155204A2. The contents of WO 2013/155204 and the Sequence Listing, including Table 9, are expressly incorporated by reference. These siRNAs can be tested for efficacy using methods described herein and/or methods known in the art.

### Example 9

### Suppression of Porphyrin Precursors Using ALAS1 siRNA in an Acute Treatment Paradigm

[0878] The AIP mouse model (see Example 5) was used to investigate whether ALAS1 siRNA would work an an acute treatment paradigm to lower already elevated levels of ALA and PBG, as would be present, for example, when a human porphyria patient suffers from an acute attack. Administration of the AD-53558 LNP11 formulation siRNA at a 1 mg/kg dose 12 hours after the last dose of phenobarbital rapidly decreased the levels of both ALA and PBG in mouse plasma, whereas in Luc control treated animals the levels continued to rise (FIG. 14). These results indicate that ALAS siRNA is effective for treating an acute attack. The ALAS1 siRNA was effective to lower and prevent further increases in ALA and PBG levels.

[0879] As can be observed in FIG. 14, ALAS siRNA had a rapid onset effect in reducing ALA and PBG levels. The onset of the effect occurred within hours after administration of the siRNA. The effect on plasma ALA could be observed within 4 hours of administration of the siRNA (see FIG. 14; the siRNA was administered at 12 hours after the last dose of phenobarbital, and a reduction in plasma ALA relative to control can be observed at 16 hours after the last dose of phenobarbital). The effect on plasma PBG could be observed within 8 hours of administration of the siRNA (see FIG. 14; the siRNA was administered at 12 hours after the last dose of phenobarbital, and a reduction in plasma ALA relative to control can be observed at 20 hours after the last dose of phenobarbital).

### Example 10

### siRNAs that Target ALAS1

[0880] Further unmodified and modified siRNA sequences that target ALAS1 siRNA were designed and produced as described in Example 2. The in vitro activity of the modified duplexes was tested as described below.

### Methods

### Lipid Mediated Transfection

[0881] For Hep3B, PMH, and primary Cynomolgus hepatocytes, transfection was carried out by adding 14.8 μl of Opti-MEM plus 0.2 μl of Lipofectamine RNAiMax per well (Invitrogen, Carlsbad Calif. catalog number13778-150) to 5 μl of each siRNA duplex to an individual well in a 96-well plate. The mixture was then incubated at room temperature for 20 minutes. Eighty μl of complete growth media without antibiotic containing the appropriate cell number were then added to the siRNA mixture. Cells were incubated for 24 hours prior to RNA purification.

[0882] Single dose experiments were performed at 1 uM, 500 nM, 20 nM, 10 nM and 0.2 nM final duplex concentration for GalNAc modified.

[0883] Free Uptake Transfection

[0884] Cryopreserved Primary Cynomolgus Hepatocytes (Celsis In Vitro Technologies, M003055-P) were thawed at 37° C. water bath immediately prior to usage and re-suspended at 0.26×10⁶ cells/ml in InVitroGRO CP (plating) medium (Celsis In Vitro Technologies, catalog number Z99029). During transfections, cells were plated onto a BD BioCoat 96 well collagen plate (BD, 356407) at 25,000 cells per well and incubated at 37° C. in an atmosphere of 5% CO₂. Free Uptake experiments were performed by adding 10 μl of siRNA duplexes in PBS per well into a 96 well (96w) plate. Ninety μl of complete growth media containing appropriate cell number for the cell type was then added to the siRNA. Cells were incubated for 24 hours prior to RNA purification. Single dose experiments were performed at 1 uM, 500 nM, 20 nM and 10 nM final duplex.

[0885] Total RNA Isolation Using DYNABEADS mRNA Isolation Kit (Invitrogen, Part #: 610-12)

[0886] Cells were harvested and lysed in 150 μl of Lysis/Binding Buffer then mixed for 5 minutes at 850 rpm using an Eppendorf Thermomixer (the mixing speed was the same throughout the process). Ten microliters of magnetic beads and 80 μl Lysis/Binding Buffer mixture were added to a round bottom plate and mixed for 1 minute. Magnetic beads were captured using a magnetic stand and the supernatant was removed without disturbing the beads. After removing the supernatant, the lysed cells were added to the remaining beads and mixed for 5 minutes. After removing the supernatant, magnetic beads were washed 2 times with 150 μl Wash Buffer A and mixed for 1 minute. The beads were capturedagain and the supernatant was removed. The beads were then washed with 150 μl Wash Buffer B, captured and the supernatant was removed. The beads were next washed with 150 μl Elution Buffer, captured and the supernatant removed. Finally, the beads were allowed to dry for 2 minutes. After drying, 50 μl of Elution Buffer was added and mixed for 5 minutes at 70° C. The beads were captured on magnet for 5 minutes. Forty-five μl of supernatant was removed and added to another 96 well plate.

[0887] cDNA Synthesis Using ABI High Capacity cDNA Reverse Transcription Kit (Applied Biosystems, Foster City, Calif., Cat #4368813)

[0888] A master mix of 2 μl 10× Buffer, 0.8 μl 25×dNTPs, 2 μl Random primers, 1 μl Reverse Transcriptase, 1 μl RNase inhibitor and 3.2 μl of H₂O per reaction as prepared. Equal volumes master mix and RNA were mixed for a final volume of 12 μl for in vitro screened or 20 μl for in vivo screened samples. cDNA was generated using a Bio-Rad C-1000 or S-1000 thermal cycler (Hercules, Calif.) through the following steps: 25° C. for 10 minutes, 37° C. for 120 minutes, 85° C. for 5 seconds, and 4° C. hold.

[0889] Real Time PCR

[0890] Two μl of cDNA were added to a master mix containing 20 of H₂O, 0.5 μl GAPDH TaqMan Probe (Life Technologies catalog number 4326317E for Hep3B cells, catalog number 352339E for primary mouse hepatocytes or custom probe for cynomolgus primary hepatocytes), 0.5 μl C5 TaqMan probe (Life Technologies catalog number Hs00167441_m1 for Hep3B cells or Mm00457879_m1 for Primary Mouse Hepatoctyes or custom probe for cynomolgus primary hepatocytes) and 50 Lightcycler 480 probe master mix (Roche catalog number 04887301001) per well in a 384 well (384 w) plates (Roche catalog number 04887301001). Real time PCR was performed in an Roche LC480 Real Time PCR system (Roche) using the ΔΔCt(RQ) assay. For in vitro screening, each duplex was tested with two biological replicates unless otherwise noted and each Real Time PCR was performed in duplicate technical replicates. For in vivo screening, each duplex was tested in one or more experiments (3 mice per group) and each Real Time PCR was run in duplicate technical replicates.

[0891] To calculate relative fold change in ALAS1 mRNA levels, real time data were analyzed using the ΔΔCt method and normalized to assays performed with cells transfected with 10 nM AD-1955, or mock transfected cells. IC₅₀s were calculated using a 4 parameter fit model using XLFit and normalized to cells transfected with AD-1955 over the same dose range, or to its own lowest dose.

[0892] The sense and antisense sequences of AD-1955 are:

SENSE:

(SEQ ID NO: 3682)

cuuAcGcuGAGuAcuucGAdTsdT
ANTISENSE:

(SEQ ID NO: 3683)

UCGAAGuACUcAGCGuAAGdTsdT.

[0893] The single strand and duplex sequences of the modified and unmodified siRNAs are provided in Table 14 and Table 15, respectively.

TABLE 14
Human ALAS1 Modified Single Strands and Duplex Sequences

| | | | | | Target sites |
|---|---|---|---|---|---|
| SEQ ID | SEQ ID NO: | | | | of antisense |
| NO: | (anti- | Duplex | | | sequence on |
| (sense) | sense) | Name | Sense Sequence (5′-3′) | Antisense Sequence (5′-3′) | NM_000688.4 |
| 3371 | 3372 | AD-58848 | CfsasUfgCfcAfaAfAfAfuGfgAfcAf | asUfsgAfuGfuCfcAfuuuUfuGfgCfaU | 1635-1657 |
| | | | uCfaUfL96 | fgsAfsc | |
| 3373 | 3374 | AD-58849 | AfsusUfuUfgAfaGfUfGfaUfgAfgU | usUfsuCfaCfuCfaUfcacUfuCfaAfaAf | 2189-2211 |
| | | | fgAfaAfL96 | usGfsc | |
| 3375 | 3376 | AD-58850 | AfsgsUfuAfuAfuUfAfAfaUfuUfuA | asGfsaUfuAfaAfaUfuuaAfuAfuAfaC | 2344-2366 |
| | | | faUfcUfL96 | fusUfsa | |
| 3377 | 3378 | AD-58851 | GfscsAfuUfuUfgAfAfGfuGfaUfgA | usCfsaCfuCfaUfcAfcuuCfaAfaAfuGf | 2187-2209 |
| | | | fgUfgAfL96 | csAfsg | |
| 3379 | 3380 | AD-58852 | GfsasAfcUfaAfuGfAfGfcAfgAfcAf | gsUfsuAfuGfuCfuGfcucAfuUfaGfuU | 1975-1997 |
| | | | uAfaCfL96 | fcsAfsu | |
| 3381 | 3382 | AD-58853 | AfsasUfgAfcCfaCfAfCfcUfaUfcGf | asAfscUfcGfaUfaGfgugUfgGfuCfaU | 973-995 |
| | | | aGfuUfL96 | fusCfsu | |
| 3383 | 3384 | AD-58854 | UfsasAfaUfuUfuAfAfUfcUfaUfaG | usUfsuAfcUfaUfaGfauuAfaAfaUfuU | 2352-2374 |
| | | | fuAfaAfL96 | fasAfsu | |
| 3385 | 3386 | AD-58855 | UfsusCfaGfuAfuGfAfUfcGfuUfuC | csAfsaAfgAfaAfcGfaucAfuAfcUfgAf | 929-951 |
| | | | fuUfuGfL96 | asAfsa | |
| 3387 | 3388 | AD-58856 | CfsasCfuUfuUfcAfGfUfaUfgAfuCf | asAfsaCfgAfuCfaUfacuGfaAfaAfgUf | 924-946 |
| | | | gUfuUfL96 | gsGfsa | |
| 3389 | 3390 | AD-58857 | AfsasAfuCfuGfuUfUfCfcAfcUfuUf | csUfsgAfaAfaGfuGfgaaAfcAfgAfuUf | 913-935 |
| | | | uCfaGfL96 | usUfsg | |
| 3391 | 3392 | AD-58858 | CfsasUfuUfgAfaAfCfUfgUfcCfaUf | usUfsgAfaUfgGfaCfaguUfuCfaAfaU | 1478-1500 |
| | | | uCfaAfL96 | fgsCfsc | |
| 3393 | 3394 | AD-58859 | CfscsUfaUfcGfaGfUfUfuUfuAfaA | csAfsgUfuUfuAfaAfaacUfcGfaUfaG | 983-1005 |
| | | | faCfuGfL96 | fgsUfsg | |
| 3395 | 3396 | AD-58861 | GfsasCfcAfgAfaAfGfAfgUfgUfcUf | gsAfsuGfaGfaCfaCfucuUfuCfuGfgU | 872-894 |
| | | | cAfuCfL96 | fcsUfsu | |
| 3397 | 3398 | AD-58862 | AfscsCfaGfaAfaGfAfGfuGfuCfuCf | asGfsaUfgAfgAfcAfcucUfuUfcUfgGf | 873-895 |
| | | | aUfcUfL96 | usCfsu | |
| 3399 | 3400 | AD-58863 | AfscsUfaAfuGfaGfCfAfgAfcAfuAf | asUfsgUfuAfuGfuCfugcUfcAfuUfaG | 1977-1999 |
| | | | aCfaUfL96 | fusUfsc | |
| 3401 | 3402 | AD-58864 | UfsasGfuAfaAfaAfCfAfuAfgUfcCf | usCfscAfgGfaCfuAfuguUfuUfuAfcU | 2366-2388 |
| | | | uGfgAfL96 | fasUfsa | |
| 3403 | 3404 | AD-58865 | UfsasUfuUfcUfgGfAfAfcUfaGfuA | asAfsuUfuAfcUfaGfuucCfaGfaAfaU | 1185-1207 |
| | | | faAfuUfL96 | fasUfsu | |
| 3405 | 3406 | AD-58867 | UfsusCfuGfcAfaAfGfCfcAfgUfcUf | csUfscAfaGfaCfuGfgcuUfuGfcAfgAf | 706-728 |
| | | | uGfaGfL96 | asGfsa | |
| 3407 | 3408 | AD-58868 | GfsasGfgAfaAfgAfGfGfuUfgCfuG | gsUfsuUfcAfgCfaAfccuCfuUfuCfcUf | 759-781 |
| | | | faAfaCfL96 | csAfsc | |
| 3409 | 3410 | AD-58869 | GfsgsUfaCfuAfgAfAfAfuAfuUfuCf | usCfscAfgAfaAfuAfuuuCfuAfgUfaCf | 1174-1196 |
| | | | uGfgAfL96 | csAfsc | |
| 3411 | 3412 | AD-58870 | GfsasCfaUfcAfuGfCfAfaAfaGfcAf | usCfsuUfuGfcUfuUfugcAfuGfaUfgU | 853-875 |
| | | | aAfgAfL96 | fcsCfsu | |
| 3413 | 3414 | AD-58871 | AfsasAfuUfuUfaAfUfCfuAfuAfgU | usUfsuUfaCfuAfuAfgauUfaAfaAfuU | 2353-2375 |
| | | | faAfaAfL96 | fusAfsa | |
| 3415 | 3416 | AD-58873 | CfsasUfgAfuCfcAfAfGfgGfaUfuCf | usUfsuCfgAfaUfcCfcuuGfgAfuCfaUf | 1362-1384 |
| | | | gAfaAfL96 | gsGfsa | |
| 3417 | 3418 | AD-58874 | AfsgsAfcCfaGfaAfAfGfaGfuGfuCf | asUfsgAfgAfcAfcUfcuuUfcUfgGfuCf | 871-893 |
| | | | uCfaUfL96 | usUfsu | |
| 3419 | 3420 | AD-58875 | AfsusCfcUfgAfaGfAfGfcGfcUfgAf | usCfscCfuCfaGfcGfcucUfuCfaGfgAf | 1810-1832 |
| | | | gGfgAfL96 | usCfsc | |
| 3421 | 3422 | AD-58876 | GfsusCfuGfuGfaUfGfAfaCfuAfaU | gsCfsuCfaUfuAfgUfucaUfcAfcAfgAf | 1966-1988 |
| | | | fgAfgCfL96 | csUfsu | |
| 3423 | 3424 | AD-58877 | CfsasGfaAfaGfaGfUfGfuCfuCfaUf | gsAfsaGfaUfgAfgAfcacUfcUfuUfcUf | 875-897 |
| | | | cUfuCfL96 | gsGfsu | |
| 3425 | 3426 | AD-58878 | AfscsUfuUfuCfaGfUfAfuGfaUfcG | gsAfsaAfcGfaUfcAfuacUfgAfaAfaGf | 925-947 |
| | | | fuUfuCfL96 | usGfsg | |
| 3427 | 3428 | AD-58879 | UfscsAfuGfcCfaAfAfAfaUfgGfaCf | usGfsaUfgUfcCfaUfuuuUfgGfcAfuG | 1634-1656 |
| | | | aUfcAfL96 | fasCfsu | |
| 3429 | 3430 | AD-58880 | AfsasUfaUfuUfcUfGfGfaAfcUfaG | usUfsuAfcUfaGfuUfccaGfaAfaUfaU | 1183-1205 |
| | | | fuAfaAfL96 | fusUfsc | |
| 3431 | 3432 | AD-58881 | CfsusUfcUfuCfaAfGfAfuAfaCfuUf | usGfsgCfaAfgUfuAfucuUfgAfaGfaA | 892-914 |
| | | | gCfcAfL96 | fgsAfsu | |
| 3433 | 3434 | AD-58882 | UfsusUfcAfgUfaUfGfAfuCfgUfuU | asAfsaGfaAfaCfgAfucaUfaCfuGfaAf | 928-950 |
| | | | fcUfuUfL96 | asAfsg | |
| 3435 | 3436 | AD-58883 | CfscsCfaGfuGfuGfGfUfuAfgUfgU | usUfsuCfaCfaCfuAfaccAfcAfcUfgGf | 790-812 |
| | | | fgAfaAfL96 | gsGfsc | |
| 3437 | 3438 | AD-58884 | GfscsUfgUfgAfgAfUfUfuAfcUfcUf | asAfsuCfaGfaGfuAfaauCfuCfaCfaGf | 1325-1347 |
| | | | gAfuUfL96 | csCfsu | |
| 3439 | 3440 | AD-58885 | AfsgsGfcUfuGfaGfCfAfaGfuUfgG | gsAfsuAfcCfaAfcUfugcUfcAfaGfcCf | 2229-2251 |
| | | | fuAfuCfL96 | usGfsa | |
| 3441 | 3442 | AD-58886 | GfsasAfaGfaGfuGfUfCfuCfaUfcU | asAfsgAfaGfaUfgAfgacAfcUfcUfuUf | 877-899 |
| | | | fuCfuUfL96 | csUfsg | |
| 3443 | 3444 | AD-58887 | AfsusUfuCfuGfgAfAfCfuAfgUfaAf | gsAfsaUfuUfaCfuAfguuCfcAfgAfaAf | 1186-1208 |
| | | | aUfuCfL96 | usAfsu | |
| 3445 | 3446 | AD-58888 | UfsgsUfgAfuGfuGfGfCfcCfaUfgAf | asAfsaCfuCfaUfgGfgccAfcAfuCfaCf | 1531-1553 |
| | | | gUfuUfL96 | asCfsa | |
| 3447 | 3448 | AD-58889 | AfsasGfaGfaGfaAfGfUfcCfuAfuU | gsAfsgAfaAfuAfgGfacuUfcUfcUfcUf | 2208-2230 |
| | | | fuCfuCfL96 | usUfsc | |
| 3449 | 3450 | AD-58890 | UfsgsGfcAfgCfaCfAfGfaUfgAfaUf | usCfsuGfaUfuCfaUfcugUfgCfuGfcCf | 671-693 |
| | | | cAfgAfL96 | asGfsg | |
| 3451 | 3452 | AD-58891 | AfsusGfaUfcGfuUfUfCfuUfuGfaG | usUfsuUfcUfcAfaAfgaaAfcGfaUfcAf | 935-957 |
| | | | faAfaAfL96 | usAfsc | |
| 3453 | 3454 | AD-58892 | UfscsUfgGfaAfcUfAfGfuAfaAfuU | asUfsgGfaAfuUfuAfcuaGfuUfcCfaG | 1189-1211 |
| | | | fcCfaUfL96 | fasAfsa | |
| 3455 | 3456 | AD-59095 | GfscsCfcAfuUfcUfUfAfuCfcCfgAf | asCfsuCfgGfgAfuAfagaAfuGfgsgsc | 360-382 |
| | | | gUfL96 | | |
| 3457 | 3458 | AD-59096 | GfsgsAfaCfcAfuGfCfCfuCfcAfuGf | asUfscAfuGfgAfgGfcauGfgUfuscsc | 1347-1369 |
| | | | aUfL96 | | |
| 3459 | 3460 | AD-59097 | UfsgsGfaGfuCfuGfUfGfcGfgAfuC | asGfsgAfuCfcGfcAfcagAfcUfcscsa | 1794-1816 |
| | | | fcUfL96 | | |
| 3461 | 3462 | AD-59098 | CfsasCfcCfaCfgGfGfUfgUfgUfgGf | usCfscCfaCfaCfaCfccgUfgGfgsusg | 1112-1134 |
| | | | gAfL96 | | |
| 3463 | 3464 | AD-59099 | GfsgsAfgUfcUfgUfGfCfgGfaUfcCf | usAfsgGfaUfcCfgCfacaGfaCfuscsc | 1795-1817 |
| | | | uAfL96 | | |
| 3465 | 3466 | AD-59100 | CfsasAfaAfcUfgCfCfCfcAfaGfaUf | usCfsaUfcUfuGfgGfgcaGfuUfususg | 428-450 |
| | | | gAfL96 | | |
| 3467 | 3468 | AD-59101 | GfscsCfuCfcAfuGfAfUfcCfaAfgGf | usCfscCfuUfgGfaUfcauGfgAfgsgsc | 1355-1377 |
| | | | gAfL96 | | |
| 3469 | 3470 | AD-59102 | CfsasUfcAfuCfcCfUfGfuGfcGfgGf | asAfscCfcGfcAfcAfgggAfuGfasusg | 1921-1943 |
| | | | uUfL96 | | |
| 3471 | 3472 | AD-59103 | AfscsCfcAfcGfgGfUfGfuGfuGfgGf | usCfscCfcAfcAfcAfcccGfuGfgsgsu | 1113-1135 |
| | | | gAfL96 | | |
| 3473 | 3474 | AD-59104 | CfsasCfaUfcAfuCfCfCfuGfuGfcGf | usCfscGfcAfcAfgGfgauGfaUfgsusg | 1919-1941 |
| | | | gAfL96 | | |
| 3475 | 3476 | AD-59105 | CfsasGfaAfaGfaGfUfGfuCfuCfaUf | asGfsaUfgAfgAfcAfcucUfuUfcsusg | 873-895 |
| | | | cUfL96 | | |
| 3477 | 3478 | AD-59106 | CfscsUfcCfaUfgAfUfCfcAfaGfgGf | asUfscCfcUfuGfgAfucaUfgGfasgsg | 1356-1378 |
| | | | aUfL96 | | |
| 3479 | 3480 | AD-59107 | UfsgsCfcCfaUfuCfUfUfaUfcCfcGf | usUfscGfgGfaUfaAfgaaUfgGfgscsa | 359-381 |
| | | | aAfL96 | | |
| 3481 | 3482 | AD-59108 | CfsusUfcAfcCfcUfGfGfcUfaAfgAf | usAfsuCfuUfaGfcCfaggGfuGfasasg | 1297-1319 |
| | | | uAfL96 | | |
| 3483 | 3484 | AD-59109 | AfsusCfaUfcCfcUfGfUfgCfgGfgUf | usAfsaCfcCfgCfaCfaggGfaUfgsasu | 1922-1944 |
| | | | uAfL96 | | |
| 3485 | 3486 | AD-59110 | AfsgsAfaAfgAfgUfGfUfcUfcAfuCf | asAfsgAfuGfaGfaCfacuCfuUfuscsu | 874-896 |
| | | | uUfL96 | | |
| 3487 | 3488 | AD-59111 | CfsusCfcAfuGfaUfCfCfaAfgGfgAf | asAfsuCfcCfuUfgGfaucAfuGfgsasg | 1357-1379 |
| | | | uUfL96 | | |
| 3489 | 3490 | AD-59112 | CfscsAfuUfcUfuAfUfCfcCfgAfgUf | usGfsaCfuCfgGfgAfuaaGfaAfusgsg | 362-384 |
| | | | cAfL96 | | |
| 3491 | 3492 | AD-59113 | CfsasCfcCfuGfgCfUfAfaGfaUfgAf | usAfsuCfaUfcUfuAfgccAfgGfgsusg | 1300-1322 |
| | | | uAfL96 | | |
| 3493 | 3494 | AD-59114 | UfscsAfuCfcCfuGfUfGfcGfgGfuUf | usCfsaAfcCfcGfcAfcagGfgAfusgsa | 1923-1945 |
| | | | gAfL96 | | |
| 3495 | 3496 | AD-59115 | AfsasGfaGfuGfuCfUfCfaUfcUfuCf | asAfsgAfaGfaUfgAfgacAfcUfcsusu | 877-899 |
| | | | uUfL96 | | |
| 3497 | 3498 | AD-59116 | GfsusCfaUfgCfcAfAfAfaAfuGfgAf | usGfsuCfcAfuUfuUfuggCfaUfgsasc | 1631-1653 |
| | | | cAfL96 | | |
| 3499 | 3500 | AD-59117 | CfsasUfuCfuUfaUfCfCfcGfaGfuCf | usGfsgAfcUfcGfgGfauaAfgAfasusg | 363-385 |
| | | | cAfL96 | | |
| 3501 | 3502 | AD-59118 | AfscsCfcUfgGfcUfAfAfgAfuGfaUf | usCfsaUfcAfuCfuUfagcCfaGfgsgsu | 1301-1323 |
| | | | gAfL96 | | |
| 3503 | 3504 | AD-59119 | CfsusCfuUfcAfcCfCfUfgGfcUfaAf | usCfsuUfaGfcCfaGfgguGfaAfgsasg | 1295-1317 |
| | | | gAfL96 | | |
| 3505 | 3506 | AD-59120 | AfsusGfcCfaAfaAfAfUfgGfaCfaUf | usGfsaUfgUfcCfaUfuuuUfgGfcsasu | 1634-1656 |
| | | | cAfL96 | | |
| 3507 | 3508 | AD-59121 | UfsgsCfcCfcAfaGfAfUfgAfuGfgAf | asUfsuCfcAfuCfaUfcuuGfgGfgscsa | 434-456 |
| | | | aUfL96 | | |
| 3509 | 3510 | AD-59122 | GfsasAfcCfaUfgCfCfUfcCfaUfgAf | usAfsuCfaUfgGfaGfgcaUfgGfususc | 1348-1370 |
| | | | uAfL96 | | |
| 3511 | 3512 | AD-59123 | UfscsUfuCfaCfcCfUfGfgCfuAfaGf | asUfscUfuAfgCfcAfgggUfgAfasgsa | 1296-1318 |
| | | | aUfL96 | | |
| 3513 | 3514 | AD-59124 | UfsgsCfcAfaAfaAfUfGfgAfcAfuCf | asUfsgAfuGfuCfcAfuuuUfuGfgscsa | 1635-1657 |
| | | | aUfL96 | | |
| 3515 | 3516 | AD-59125 | CfscsAfgAfaAfgAfGfUfgUfcUfcAf | usAfsuGfaGfaCfaCfucuUfuCfusgsg | 872-894 |
| | | | uAfL96 | | |
| 3517 | 3518 | AD-59126 | GfsasAfaCfuGfuCfCfAfuUfcAfaUf | usCfsaUfuGfaAfuGfgacAfgUfususc | 1481-1503 |
| | | | gAfL96 | | |
| 3519 | 3520 | AD-59127 | UfscsAfcCfcUfgGfCfUfaAfgAfuGf | asUfscAfuCfuUfaGfccaGfgGfusgsa | 1299-1321 |
| | | | aUfL96 | | |
| 3521 | 3522 | AD-59128 | CfscsCfuGfgAfgUfCfUfgUfgCfgGf | asUfscCfgCfaCfaGfacuCfcAfgsgsg | 1791-1813 |
| | | | aUfL96 | | |
| 3523 | 3524 | AD-59129 | GfsasAfaGfaGfuGfUfCfuCfaUfcU | usAfsaGfaUfgAfgAfcacUfcUfususc | 875-897 |
| | | | fuAfL96 | | |
| 3525 | 3526 | AD-59130 | UfsgsGfaGfcCfcUfGfGfaGfuCfuG | usAfscAfgAfcUfcCfaggGfcUfcscsa | 1786-1808 |
| | | | fuAfL96 | | |

TABLE 15
Human ALAS1 Unmodified Single Strands and Duplex Sequences

| | SEQ ID | | | | Target sites |
|---|---|---|---|---|---|
| SEQ ID | NO: | | | | of antisense |
| NO: | (anti- | Duplex | | | sequence on |
| (sense) | sense) | Name | Sense Sequence (5′-3′) | Antisense Sequence (5′-3′) | NM_000688.4 |
| 3684 | 3527 | AD-58848 | CAUGCCAAAAAUGGACAUCAU | AUGAUGUCCAUUUUUGGCAUGAC | 1635-1657 |
| 3528 | 3529 | AD-58849 | AUUUUGAAGUGAUGAGUGAAA | UUUCACUCAUCACUUCAAAAUGC | 2189-2211 |
| 3530 | 3531 | AD-58850 | AGUUAUAUUAAAUUUUAAUCU | AGAUUAAAAUUUAAUAUAACUUA | 2344-2366 |
| 3532 | 3533 | AD-58851 | GCAUUUUGAAGUGAUGAGUGA | UCACUCAUCACUUCAAAAUGCAG | 2187-2209 |
| 3534 | 3535 | AD-58852 | GAACUAAUGAGCAGACAUAAC | GUUAUGUCUGCUCAUUAGUUCAU | 1975-1997 |
| 3536 | 3537 | AD-58853 | AAUGACCACACCUAUCGAGUU | AACUCGAUAGGUGUGGUCAUUCU | 973-995 |
| 3538 | 3539 | AD-58854 | UAAAUUUUAAUCUAUAGUAAA | UUUACUAUAGAUUAAAAUUUAAU | 2352-2374 |
| 3540 | 3541 | AD-58855 | UUCAGUAUGAUCGUUUCUUUG | CAAAGAAACGAUCAUACUGAAAA | 929-951 |
| 3542 | 3543 | AD-58856 | CACUUUUCAGUAUGAUCGUUU | AAACGAUCAUACUGAAAAGUGGA | 924-946 |
| 3544 | 3545 | AD-58857 | AAAUCUGUUUCCACUUUUCAG | CUGAAAAGUGGAAACAGAUUUUG | 913-935 |
| 3546 | 3547 | AD-58858 | CAUUUGAAACUGUCCAUUCAA | UUGAAUGGACAGUUUCAAAUGCC | 1478-1500 |
| 3548 | 3549 | AD-58859 | CCUAUCGAGUUUUUAAAACUG | CAGUUUUAAAAACUCGAUAGGUG | 983-1005 |
| 3550 | 3551 | AD-58861 | GACCAGAAAGAGUGUCUCAUC | GAUGAGACACUCUUUCUGGUCUU | 872-894 |
| 3552 | 3553 | AD-58862 | ACCAGAAAGAGUGUCUCAUCU | AGAUGAGACACUCUUUCUGGUCU | 873-895 |
| 3554 | 3555 | AD-58863 | ACUAAUGAGCAGACAUAACAU | AUGUUAUGUCUGCUCAUUAGUUC | 1977-1999 |
| 3556 | 3557 | AD-58864 | UAGUAAAAACAUAGUCCUGGA | UCCAGGACUAUGUUUUUACUAUA | 2366-2388 |
| 3558 | 3559 | AD-58865 | UAUUUCUGGAACUAGUAAAUU | AAUUUACUAGUUCCAGAAAUAUU | 1185-1207 |
| 3560 | 3561 | AD-58867 | UUCUGCAAAGCCAGUCUUGAG | CUCAAGACUGGCUUUGCAGAAGA | 706-728 |
| 3562 | 3563 | AD-58868 | GAGGAAAGAGGUUGCUGAAAC | GUUUCAGCAACCUCUUUCCUCAC | 759-781 |
| 3564 | 3565 | AD-58869 | GGUACUAGAAAUAUUUCUGGA | UCCAGAAAUAUUUCUAGUACCAC | 1174-1196 |
| 3566 | 3567 | AD-58870 | GACAUCAUGCAAAAGCAAAGA | UCUUUGCUUUUGCAUGAUGUCCU | 853-875 |
| 3568 | 3569 | AD-58871 | AAAUUUUAAUCUAUAGUAAAA | UUUUACUAUAGAUUAAAAUUUAA | 2353-2375 |
| 3570 | 3571 | AD-58873 | CAUGAUCCAAGGGAUUCGAAA | UUUCGAAUCCCUUGGAUCAUGGA | 1362-1384 |
| 3572 | 3573 | AD-58874 | AGACCAGAAAGAGUGUCUCAU | AUGAGACACUCUUUCUGGUCUUU | 871-893 |
| 3574 | 3575 | AD-58875 | AUCCUGAAGAGCGCUGAGGGA | UCCCUCAGCGCUCUUCAGGAUCC | 1810-1832 |
| 3576 | 3577 | AD-58876 | GUCUGUGAUGAACUAAUGAGC | GCUCAUUAGUUCAUCACAGACUU | 1966-1988 |
| 3578 | 3579 | AD-58877 | CAGAAAGAGUGUCUCAUCUUC | GAAGAUGAGACACUCUUUCUGGU | 875-897 |
| 3580 | 3581 | AD-58878 | ACUUUUCAGUAUGAUCGUUUC | GAAACGAUCAUACUGAAAAGUGG | 925-947 |
| 3582 | 3583 | AD-58879 | UCAUGCCAAAAAUGGACAUCA | UGAUGUCCAUUUUUGGCAUGACU | 1634-1656 |
| 3584 | 3585 | AD-58880 | AAUAUUUCUGGAACUAGUAAA | UUUACUAGUUCCAGAAAUAUUUC | 1183-1205 |
| 3586 | 3587 | AD-58881 | CUUCUUCAAGAUAACUUGCCA | UGGCAAGUUAUCUUGAAGAAGAU | 892-914 |
| 3588 | 3589 | AD-58882 | UUUCAGUAUGAUCGUUUCUUU | AAAGAAACGAUCAUACUGAAAAG | 928-950 |
| 3590 | 3591 | AD-58883 | CCCAGUGUGGUUAGUGUGAAA | UUUCACACUAACCACACUGGGGC | 790-812 |
| 3592 | 3593 | AD-58884 | GCUGUGAGAUUUACUCUGAUU | AAUCAGAGUAAAUCUCACAGCCU | 1325-1347 |
| 3594 | 3595 | AD-58885 | AGGCUUGAGCAAGUUGGUAUC | GAUACCAACUUGCUCAAGCCUGA | 2229-2251 |
| 3596 | 3597 | AD-58886 | GAAAGAGUGUCUCAUCUUCUU | AAGAAGAUGAGACACUCUUUCUG | 877-899 |
| 3598 | 3599 | AD-58887 | AUUUCUGGAACUAGUAAAUUC | GAAUUUACUAGUUCCAGAAAUAU | 1186-1208 |
| 3600 | 3601 | AD-58888 | UGUGAUGUGGCCCAUGAGUUU | AAACUCAUGGGCCACAUCACACA | 1531-1553 |
| 3602 | 3603 | AD-58889 | AAGAGAGAAGUCCUAUUUCUC | GAGAAAUAGGACUUCUCUCUUUC | 2208-2230 |
| 3604 | 3605 | AD-58890 | UGGCAGCACAGAUGAAUCAGA | UCUGAUUCAUCUGUGCUGCCAGG | 671-693 |
| 3606 | 3607 | AD-58891 | AUGAUCGUUUCUUUGAGAAAA | UUUUCUCAAAGAAACGAUCAUAC | 935-957 |
| 3608 | 3609 | AD-58892 | UCUGGAACUAGUAAAUUCCAU | AUGGAAUUUACUAGUUCCAGAAA | 1189-1211 |
| 3610 | 3611 | AD-59095 | GCCCAUUCUUAUCCCGAGU | ACUCGGGAUAAGAAUGGGC | 360-382 |
| 3612 | 3613 | AD-59096 | GGAACCAUGCCUCCAUGAU | AUCAUGGAGGCAUGGUUCC | 1347-1369 |
| 3614 | 3615 | AD-59097 | UGGAGUCUGUGCGGAUCCU | AGGAUCCGCACAGACUCCA | 1794-1816 |
| 3616 | 3617 | AD-59098 | CACCCACGGGUGUGUGGGA | UCCCACACACCCGUGGGUG | 1112-1134 |
| 3618 | 3619 | AD-59099 | GGAGUCUGUGCGGAUCCUA | UAGGAUCCGCACAGACUCC | 1795-1817 |
| 3620 | 3621 | AD-59100 | CAAAACUGCCCCAAGAUGA | UCAUCUUGGGGCAGUUUUG | 428-450 |
| 3622 | 3623 | AD-59101 | GCCUCCAUGAUCCAAGGGA | UCCCUUGGAUCAUGGAGGC | 1355-1377 |
| 3624 | 3625 | AD-59102 | CAUCAUCCCUGUGCGGGUU | AACCCGCACAGGGAUGAUG | 1921-1943 |
| 3626 | 3627 | AD-59103 | ACCCACGGGUGUGUGGGGA | UCCCCACACACCCGUGGGU | 1113-1135 |
| 3628 | 3629 | AD-59104 | CACAUCAUCCCUGUGCGGA | UCCGCACAGGGAUGAUGUG | 1919-1941 |
| 3630 | 3631 | AD-59105 | CAGAAAGAGUGUCUCAUCU | AGAUGAGACACUCUUUCUG | 873-895 |
| 3632 | 3633 | AD-59106 | CCUCCAUGAUCCAAGGGAU | AUCCCUUGGAUCAUGGAGG | 1356-1378 |
| 3634 | 3635 | AD-59107 | UGCCCAUUCUUAUCCCGAA | UUCGGGAUAAGAAUGGGCA | 359-381 |
| 3636 | 3637 | AD-59108 | CUUCACCCUGGCUAAGAUA | UAUCUUAGCCAGGGUGAAG | 1297-1319 |
| 3638 | 3639 | AD-59109 | AUCAUCCCUGUGCGGGUUA | UAACCCGCACAGGGAUGAU | 1922-1944 |
| 3640 | 3641 | AD-59110 | AGAAAGAGUGUCUCAUCUU | AAGAUGAGACACUCUUUCU | 874-896 |
| 3642 | 3643 | AD-59111 | CUCCAUGAUCCAAGGGAUU | AAUCCCUUGGAUCAUGGAG | 1357-1379 |
| 3644 | 3645 | AD-59112 | CCAUUCUUAUCCCGAGUCA | UGACUCGGGAUAAGAAUGG | 362-384 |
| 3646 | 3647 | AD-59113 | CACCCUGGCUAAGAUGAUA | UAUCAUCUUAGCCAGGGUG | 1300-1322 |
| 3648 | 3649 | AD-59114 | UCAUCCCUGUGCGGGUUGA | UCAACCCGCACAGGGAUGA | 1923-1945 |
| 3650 | 3651 | AD-59115 | AAGAGUGUCUCAUCUUCUU | AAGAAGAUGAGACACUCUU | 877-899 |
| 3652 | 3653 | AD-59116 | GUCAUGCCAAAAAUGGACA | UGUCCAUUUUUGGCAUGAC | 1631-1653 |
| 3654 | 3655 | AD-59117 | CAUUCUUAUCCCGAGUCCA | UGGACUCGGGAUAAGAAUG | 363-385 |
| 3656 | 3657 | AD-59118 | ACCCUGGCUAAGAUGAUGA | UCAUCAUCUUAGCCAGGGU | 1301-1323 |
| 3658 | 3659 | AD-59119 | CUCUUCACCCUGGCUAAGA | UCUUAGCCAGGGUGAAGAG | 1295-1317 |
| 3660 | 3661 | AD-59120 | AUGCCAAAAAUGGACAUCA | UGAUGUCCAUUUUUGGCAU | 1634-1656 |
| 3662 | 3663 | AD-59121 | UGCCCCAAGAUGAUGGAAU | AUUCCAUCAUCUUGGGGCA | 434-456 |
| 3664 | 3665 | AD-59122 | GAACCAUGCCUCCAUGAUA | UAUCAUGGAGGCAUGGUUC | 1348-1370 |
| 3666 | 3667 | AD-59123 | UCUUCACCCUGGCUAAGAU | AUCUUAGCCAGGGUGAAGA | 1296-1318 |
| 3668 | 3669 | AD-59124 | UGCCAAAAAUGGACAUCAU | AUGAUGUCCAUUUUUGGCA | 1635-1657 |
| 3670 | 3671 | AD-59125 | CCAGAAAGAGUGUCUCAUA | UAUGAGACACUCUUUCUGG | 872-894 |
| 3672 | 3673 | AD-59126 | GAAACUGUCCAUUCAAUGA | UCAUUGAAUGGACAGUUUC | 1481-1503 |
| 3674 | 3675 | AD-59127 | UCACCCUGGCUAAGAUGAU | AUCAUCUUAGCCAGGGUGA | 1299-1321 |
| 3676 | 3677 | AD-59128 | CCCUGGAGUCUGUGCGGAU | AUCCGCACAGACUCCAGGG | 1791-1813 |
| 3678 | 3679 | AD-59129 | GAAAGAGUGUCUCAUCUUA | UAAGAUGAGACACUCUUUC | 875-897 |
| 3680 | 3681 | AD-59130 | UGGAGCCCUGGAGUCUGUA | UACAGACUCCAGGGCUCCA | 1786-1808 |

[0894] The results of the in vitro assays are provided in Table 16. Table 16 also notes the target species of each of the siRNAs.

TABLE 16
Results of Functional Assays

| | | | Cyno Free Uptake | | | | Cyno Transfection | | Hep3b Transfection | |
|---|---|---|---|---|---|---|---|---|---|---|
| | Target | | 1 uM | | 20 nM | | 20 nM | 0.2 nM | 10 nM | 0.1 nM |
| Duplex ID | Species | Type | Avg | 500 nM | Avg | 10 nM | Avg | Avg | Avg | Avg |
| AD-58848 | M/R/Rh/H | 21/23 | 131.6 | 176.0 | 104.4 | 128.0 | 43.5 | 44.8 | 25.3 | 76.8 |
| AD-58849 | H/Rh | 21/23 | 91.9 | 88.1 | 92.2 | 105.0 | 29.4 | 35.4 | 11.5 | 47.1 |
| AD-58850 | H/Rh | 21/23 | 79.4 | 103.4 | 80.0 | 111.2 | NA | 62.2 | 31.3 | 72.0 |
| AD-58851 | H/Rh | 21/23 | 99.7 | 74.7 | 94.8 | 104.7 | NA | 40.7 | 8.6 | 81.3 |
| AD-58852 | H/Rh | 21/23 | 108.1 | 91.8 | 103.3 | 111.9 | 101.1 | 128.8 | 43.4 | 129.0 |
| AD-58853 | H/Rh | 21/23 | 74.8 | 67.7 | 84.2 | 93.5 | 24.7 | 52.9 | 14.1 | 61.2 |
| AD-58854 | H/Rh | 21/23 | 145.9 | 124.1 | 106.6 | 115.3 | 119.0 | 83.9 | 85.0 | 84.0 |
| AD-58855 | H/Rh | 21/23 | 81.5 | 97.9 | 92.7 | 101.8 | 39.5 | 40.3 | 15.3 | 67.6 |
| AD-58856 | H/Rh | 21/23 | 74.1 | 90.6 | 84.6 | 82.6 | 22.4 | 30.7 | 8.7 | 33.3 |
| AD-58857 | H/Rh | 21/23 | 64.7 | 91.4 | 62.3 | 87.1 | 22.0 | 31.6 | 9.8 | 106.3 |
| AD-58858 | H/Rh | 21/23 | 67.4 | 91.7 | 68.6 | 98.3 | 27.9 | 40.3 | 17.4 | 44.8 |
| AD-58859 | H/Rh | 21/23 | 71.2 | 77.2 | 92.4 | 90.1 | 19.1 | 34.3 | 13.1 | 39.7 |
| AD-58861 | H/Rh | 21/23 | 104.6 | 107.2 | 102.0 | 100.6 | 25.9 | 35.1 | 18.0 | 69.8 |
| AD-58862 | H/Rh | 21/23 | 66.8 | 77.0 | 68.7 | 88.5 | 20.3 | 31.1 | 24.2 | 49.9 |
| AD-58863 | H/Rh | 21/23 | 70.8 | 66.8 | 76.8 | 98.5 | 21.5 | 29.7 | 8.7 | 54.9 |
| AD-58864 | H/Rh | 21/23 | 76.2 | 85.6 | 83.7 | 100.8 | 60.4 | 61.0 | 56.4 | 87.3 |
| AD-58865 | H/Rh | 21/23 | 67.9 | 77.9 | 95.9 | 98.4 | 21.3 | 38.6 | 15.5 | 81.4 |
| AD-58867 | H/Rh | 21/23 | 95.9 | 93.3 | 107.0 | 97.5 | 32.3 | 42.7 | 16.6 | 79.8 |
| AD-58868 | H/Rh | 21/23 | 95.2 | 92.1 | 116.2 | 94.7 | 54.6 | 69.2 | 61.5 | 105.9 |
| AD-58869 | H/Rh | 21/23 | 65.0 | 78.2 | 75.8 | 88.2 | 17.4 | 25.0 | 13.0 | 63.9 |
| AD-58870 | H/Rh | 21/23 | 69.4 | 92.3 | 81.0 | 88.1 | 29.2 | 43.8 | 33.7 | 79.1 |
| AD-58871 | H/Rh | 21/23 | 61.2 | 77.3 | 88.2 | 77.0 | 71.2 | 73.2 | 36.7 | 110.3 |
| AD-58873 | H/Rh | 21/23 | 95.2 | 100.9 | 83.3 | 94.6 | 54.2 | 52.8 | 36.6 | 73.3 |
| AD-58874 | H/Rh | 21/23 | 75.8 | 76.8 | 63.8 | 85.3 | 22.3 | 31.2 | 15.0 | 38.2 |
| AD-58875 | H/Rh | 21/23 | 80.7 | 88.7 | 78.6 | 97.9 | 48.6 | 73.6 | 61.2 | 90.6 |
| AD-58876 | H/Rh | 21/23 | 90.8 | 93.1 | 82.5 | 100.2 | 41.1 | 56.9 | 21.2 | 58.7 |
| AD-58877 | H/Rh | 21/23 | 68.3 | 85.1 | 51.2 | 78.7 | 18.5 | 46.6 | 11.9 | 27.4 |
| AD-58878 | H/Rh | 21/23 | 78.3 | 68.3 | 81.2 | 91.2 | 24.1 | 23.4 | 6.2 | 37.1 |
| AD-58879 | H/Rh | 21/23 | 87.9 | 94.1 | 79.7 | 95.4 | 32.0 | 47.8 | 15.7 | 82.5 |
| AD-58880 | H/Rh | 21/23 | 74.9 | 72.2 | 88.9 | 88.1 | 20.1 | 27.5 | 14.0 | 60.7 |
| AD-58881 | H/Rh | 21/23 | 85.9 | 76.8 | 78.8 | 118.0 | 22.2 | 36.7 | 27.6 | 71.6 |
| AD-58882 | H/Rh | 21/23 | 54.1 | 53.4 | 60.3 | 85.8 | 14.6 | 27.2 | 8.2 | 23.8 |
| AD-58883 | H/Rh | 21/23 | 80.4 | 69.9 | 75.7 | 80.3 | 31.8 | 25.8 | 12.3 | 63.0 |
| AD-58884 | H/Rh | 21/23 | 57.7 | 55.3 | 64.8 | 78.2 | 20.0 | 30.0 | 11.8 | 68.9 |
| AD-58885 | H/Rh | 21/23 | 101.8 | 91.8 | 104.1 | 101.5 | 85.9 | 71.9 | 61.8 | 71.2 |
| AD-58886 | M/R/Rh/H | 21/23 | 47.1 | 58.0 | 36.3 | 93.3 | 16.0 | 26.6 | 9.2 | 32.0 |
| AD-58887 | H/Rh | 21/23 | 73.6 | 98.7 | 82.6 | 95.2 | 28.5 | 33.5 | 12.8 | 65.2 |
| AD-58888 | H/Rh | 21/23 | 90.2 | 69.9 | 69.4 | 85.6 | 46.9 | 45.0 | 16.6 | 72.0 |
| AD-58889 | H/Rh | 21/23 | 83.6 | 98.6 | 82.4 | 92.2 | 36.5 | 40.3 | 31.6 | 99.4 |
| AD-58890 | H/Rh | 21/23 | 69.5 | 95.4 | 84.2 | 88.2 | 50.8 | 45.6 | 21.7 | 92.9 |
| AD-58891 | H/Rh | 21/23 | 62.8 | 75.7 | 75.4 | 109.2 | 23.6 | 34.3 | 15.6 | 55.8 |
| AD-58892 | H/Rh | 21/23 | 60.2 | 92.9 | 89.8 | 92.9 | 22.8 | 43.3 | 20.2 | 75.6 |
| AD-59095 | M/R/Rh/H | 19 mer | 88.9 | NA | 132.8 | NA | 48.3 | 97.4 | 54.3 | 99.0 |
| AD-59096 | M/R/Rh/H | 19 mer | 95.5 | NA | 90.5 | NA | 105.7 | 138.6 | 131.4 | 120.7 |
| AD-59097 | M/R/Rh/H | 19 mer | 92.5 | NA | 84.2 | NA | 75.0 | NA | 94.7 | 108.5 |
| AD-59098 | M/R/Rh/H | 19 mer | 84.0 | NA | 87.7 | NA | 109.3 | NA | 130.0 | 87.3 |
| AD-59099 | M/R/Rh/H | 19 mer | 89.7 | NA | 90.0 | NA | 77.8 | 85.4 | 46.8 | 74.9 |
| AD-59100 | M/R/Rh/H | 19 mer | 84.8 | NA | 144.3 | NA | 70.6 | 108.1 | 91.5 | 117.6 |
| AD-59101 | M/R/Rh/H | 19 mer | 79.0 | NA | 103.8 | NA | 89.8 | 102.9 | 124.2 | 107.0 |
| AD-59102 | M/R/Rh/H | 19 mer | 85.9 | NA | 100.6 | NA | 72.2 | 68.5 | 87.9 | 95.1 |
| AD-59103 | M/R/Rh/H | 19 mer | 86.0 | NA | 91.1 | NA | 93.0 | 81.3 | 130.0 | 96.0 |
| AD-59104 | M/R/Rh/H | 19 mer | 92.6 | NA | 96.9 | NA | 94.9 | 91.4 | 124.4 | 83.1 |
| AD-59105 | M/R/Rh/H | 19 mer | 48.9 | NA | 101.7 | NA | 18.4 | 48.9 | 17.0 | 34.7 |
| AD-59106 | M/R/Rh/H | 19 mer | 63.2 | NA | 76.7 | NA | 28.5 | 40.7 | 28.6 | 46.4 |
| AD-59107 | M/R/Rh/H | 19 mer | 71.4 | NA | 68.7 | NA | 37.1 | 45.3 | 26.8 | 63.6 |
| AD-59108 | M/R/Rh/H | 19 mer | 70.7 | NA | 85.1 | NA | 89.9 | 84.8 | 139.2 | 101.7 |
| AD-59109 | M/R/Rh/H | 19 mer | 86.1 | NA | 83.4 | NA | 84.9 | 96.2 | 131.7 | 86.7 |
| AD-59110 | M/R/Rh/H | 19 mer | 70.8 | NA | 119.7 | NA | 38.5 | 60.4 | 67.4 | 80.3 |
| AD-59111 | M/R/Rh/H | 19 mer | 66.1 | NA | 76.5 | NA | 52.2 | 61.0 | 69.7 | 87.6 |
| AD-59112 | M/R/Rh/H | 19 mer | 71.2 | NA | 80.2 | NA | 91.2 | 83.4 | 127.4 | 89.0 |
| AD-59113 | M/R/Rh/H | 19 mer | 67.0 | NA | 77.8 | NA | 49.1 | 59.0 | 66.8 | 91.4 |
| AD-59114 | M/R/Rh/H | 19 mer | 81.7 | NA | 79.3 | NA | 96.3 | 88.0 | 129.6 | 72.4 |
| AD-59115 | M/R/Rh/H | 19 mer | 40.4 | NA | 69.6 | NA | 19.6 | 35.7 | 9.3 | 16.9 |
| AD-59116 | M/R/Rh/H | 19 mer | 72.2 | NA | 78.3 | NA | 53.5 | 77.8 | 70.1 | 107.8 |
| AD-59117 | M/R/Rh/H | 19 mer | 70.7 | NA | 75.6 | NA | 75.8 | 74.9 | 129.0 | 103.5 |
| AD-59118 | M/R/Rh/H | 19 mer | 68.8 | NA | 75.9 | NA | 81.4 | 82.1 | 114.1 | 89.7 |
| AD-59119 | M/R/Rh/H | 19 mer | 64.9 | NA | 86.5 | NA | 85.1 | 125.1 | 122.8 | 124.8 |
| AD-59120 | M/R/Rh/H | 19 mer | 63.5 | NA | 75.1 | NA | 29.9 | 52.0 | 16.1 | 54.1 |
| AD-59121 | M/R/Rh/H | 19 mer | 67.6 | NA | 72.0 | NA | 88.8 | 77.4 | 108.0 | 103.1 |
| AD-59122 | M/R/Rh/H | 19 mer | 60.2 | NA | 62.3 | NA | 25.1 | 45.3 | 16.2 | 54.8 |
| AD-59123 | M/R/Rh/H | 19 mer | 68.6 | NA | 108.2 | NA | 59.2 | 84.6 | 80.0 | 97.7 |
| AD-59124 | M/R/Rh/H | 19 mer | 47.5 | NA | 56.5 | NA | 23.9 | 40.0 | 9.8 | 18.9 |
| AD-59125 | M/R/Rh/H | 19 mer | 45.4 | NA | 47.2 | NA | 15.2 | 40.7 | 14.7 | 15.1 |
| AD-59126 | M/R/Rh/H | 19 mer | 64.3 | NA | 74.6 | NA | 51.6 | 57.1 | 35.5 | 54.4 |
| AD-59127 | M/R/Rh/H | 19 mer | 103.4 | NA | 105.8 | NA | 94.0 | 156.4 | 135.9 | 113.7 |
| AD-59128 | M/R/Rh/H | 19 mer | 102.4 | NA | 81.4 | NA | 66.3 | 89.3 | 60.2 | 74.9 |
| AD-59129 | M/R/Rh/H | 19 mer | 41.3 | NA | 38.8 | NA | 17.9 | 41.4 | 8.6 | 12.6 |
| AD-59130 | M/R/Rh/H | 19 mer | 58.3 | NA | 80.8 | NA | 94.9 | 78.3 | 106.7 | 88.0 |

[0895] Table 17 illustrates the IC₅₀s of select ALAS1 siRNA duplexes. The IC₅₀s were determined from the knockdown of endogenously expressed ALAS1 in the Hep3B cell line, at 24 hours following transfection of each ALAS1 modified siRNA duplex (see Table 14). At least seven duplexes, including AD-58882, AD-58878, AD-58886, AD-58877, AD-59115, AD-58856, and AD-59129, consistently demonstrated IC₅₀s of less than 0.1 nm, indicating that these duplexes were particularly effective in suppressing ALAS1 expression.

TABLE 17
IC₅₀s of select ALAS1 siRNA duplexes

| Duplex ID | 384 w IC50 (nM) | 96 w IC50 (nM) |
|---|---|---|
| AD-58882 | 0.008 | 0.014 |
| AD-58878 | 0.040 | 0.031 |
| AD-58886 | 0.037 | 0.033 |
| AD-58877 | 0.031 | 0.034 |
| AD-59115 | 0.093 | 0.052 |
| AD-58856 | 0.061 | 0.066 |
| AD-59129 | 0.085 | 0.071 |
| AD-59124 | 0.572 | 0.078 |
| AD-58874 | 0.140 | 0.102 |
| AD-59125 | 0.118 | 0.115 |
| AD-59105 | 0.511 | 0.144 |
| AD-59120 | 180.592 | 0.498 |
| AD-59122 | 36.646 | 0.646 |
| AD-59106 | 7.906 | 0.847 |
| AD-59126 | n/a | 1.014 |
| AD-59107 | n/a | 1.971 |

### Example 11

### ALAS1-GalNAc Activity in AIP Phenobarbital Induction Mouse Model

[0896] The AIP mouse model was used to investigate the effect of an siRNA that was an ALAS1-GalNAc conjugate. The siRNA had the sequence of duplex AD-58632 (see Table 20)

TABLE 20
Sequences of ALAS1 siRNA Duplex AD-58632

| | SEQ ID | | | | |
|---|---|---|---|---|---|
| SEQ ID | NO: | Target sites | | | |
| NO: | (anti- | of antisense | Duplex | | |
| (sense) | sense) | sequence | Name | Sense Sequence (5′-3′) | Antisense Sequence (5′-3′) |
| 4149 | 4150 | 873-895 | AD- | GfsasAfaGfaGfuGfUfCfuCfaUfc | asAfsgAfaGfaUfgAfgacAfcUfcUfu |
| | | | 58632 | UfuCfuUfL96 | Ufcsusg |

[0897] AIP mice were untreated (baseline), or injected subcutaneously on day 1 with saline or the ALAS1-GalNAc conjugate at a dose of 20 mg/kg. On Days 2, 3, and 4 they were left untreated (baseline) or they were treated with IP injections of Phenobarbital. On Day 5 plasma was taken and levels of ALA and PBG were measured using an LC-MS assay. As shown in FIG. 15, the ALAS1-GalNAc conjugate blunted the production of plasma ALA and PBG by about 84 and 80% respectively. These results indicate that treatment with an ALAS1-GalNAc conjugate was effective in preventing increases in both plasma ALA and PBG associated with phenobarbital-induced acute attacks in this AIP animal model.

### Example 12

### Further siRNAs that Target ALAS1 and Inhibit ALAS1 Expression

[0898] Modified siRNA sequences that target ALAS1 siRNA were designed and produced as described in Example 2. The sequences are provided in Table 18. The in vitro activity of the modified duplexes was tested as described below.

TABLE 18
Human ALAS1 Modified Single Strands and Duplex Sequences

| | SEQ ID | | | | Target sites of |
|---|---|---|---|---|---|
| SEQ ID | NO: | | | | antisense |
| NO: | (anti- | Duplex | | | sequence on |
| (sense) | sense) | Name | Sense Sequence (5′-3′) | Antisense Sequence (5′-3′) | NM_000688.4 |
| 3685 | 3686 | AD-59453 | CAGGCAAAUCUCUGUUGUUdTdT | AACAACAGAGAUUUGCCUGdTdT | 402-420 |
| 3687 | 3688 | AD-59395 | GAAAAAAAUUGAUGAGAAAdTdT | UUUCUCAUCAAUUUUUUUCdTdT | 949-967 |
| 3689 | 3690 | AD-59477 | GGAAAGAUGCCGCACUCUUdTdT | AAGAGUGCGGCAUCUUUCCdTdT | 1242-1260 |
| 3691 | 3692 | AD-59492 | UGUCUCAUCUUCUUCAAGAdTdT | UCUUGAAGAAGAUGAGACAdTdT | 882-900 |
| 3693 | 3694 | AD-59361 | ACAUCUACGUGCAAGCAAUdTdT | AUUGCUUGCACGUAGAUGUdTdT | 1992-2010 |
| 3695 | 3696 | AD-59462 | UUCUCUGAUUGACACCGUAdTdT | UACGGUGUCAAUCAGAGAAdTdT | 1711-1729 |
| 3697 | 3698 | AD-59433 | GCUGCUGGCUUCAUCUUCAdTdT | UGAAGAUGAAGCCAGCAGCdTdT | 1739-1757 |
| 3699 | 3700 | AD-59424 | AGCGCAACGUCAAACUCAUdTdT | AUGAGUUUGACGUUGCGCUdTdT | 1851-1869 |
| 3701 | 3702 | AD-59414 | UAUUUCUGGAACUAGUAAAdTdT | UUUACUAGUUCCAGAAAUAdTdT | 1183-1201 |
| 3703 | 3704 | AD-59539 | GGUUGUGUUGGAGGGUACAdTdT | UGUACCCUCCAACACAACCdTdT | 1679-1697 |
| 3705 | 3706 | AD-59400 | GUGUCAGUCUGGUGCAGUAdTdT | UACUGCACCAGACUGACACdTdT | 1070-1088 |
| 3707 | 3708 | AD-59551 | CUUUGUGGCCAAUGACUCAdTdT | UGAGUCAUUGGCCACAAAGdTdT | 1273-1291 |
| 3709 | 3710 | AD-59482 | AGAUGCUGCUAAAAACACAdTdT | UGUGUUUUUAGCAGCAUCUdTdT | 1942-1960 |
| 3711 | 3712 | AD-59448 | GAGUCAUGCCAAAAAUGGAdTdT | UCCAUUUUUGGCAUGACUCdTdT | 1629-1647 |
| 3713 | 3714 | AD-59392 | CUGUGCGGAUCCUGAAGAGdTdT | CUCUUCAGGAUCCGCACAGdTdT | 1800-1818 |
| 3715 | 3716 | AD-59469 | CACUUUGAAACAACAUGGUdTdT | ACCAUGUUGUUUCAAAGUGdTdT | 1141-1159 |
| 3717 | 3718 | AD-59431 | AAGUGAUGAGUGAAAGAGAdTdT | UCUCUUUCACUCAUCACUUdTdT | 2193-2211 |
| 3719 | 3720 | AD-59423 | AUCUGCUAGUCACAUGGAAdTdT | UUCCAUGUGACUAGCAGAUdTdT | 2103-2121 |
| 3721 | 3722 | AD-59517 | UGGGGCAGGUGGUACUAGAdTdT | UCUAGUACCACCUGCCCCAdTdT | 1162-1180 |
| 3723 | 3724 | AD-59578 | GCAGAUGACUAUUCAGACUdTdT | AGUCUGAAUAGUCAUCUGCdTdT | 1031-1049 |
| 3725 | 3726 | AD-59495 | GCCUCAUUCCUCAGCUGAGdTdT | CUCAGCUGAGGAAUGAGGCdTdT | 2143-2161 |
| 3727 | 3728 | AD-59432 | GUAUGAUCGUUUCUUUGAGdTdT | CUCAAAGAAACGAUCAUACdTdT | 931-949 |
| 3729 | 3730 | AD-59382 | UAUCCAGAUGGUCUUCAGAdTdT | UCUGAAGACCAUCUGGAUAdTdT | 2302-2320 |
| 3731 | 3732 | AD-59472 | UAGUGUGAAAACCGAUGGAdTdT | UCCAUCGGUUUUCACACUAdTdT | 799-817 |
| 3733 | 3734 | AD-59459 | UCCCCAUGGCAGAUGACUAdTdT | UAGUCAUCUGCCAUGGGGAdTdT | 1023-1041 |
| 3735 | 3736 | AD-59413 | CCACUGCAGCAGUACACUAdTdT | UAGUGUACUGCUGCAGUGGdTdT | 483-501 |
| 3737 | 3738 | AD-59478 | CUGUGAACCGGCGAGCACAdTdT | UGUGCUCGCCGGUUCACAGdTdT | 999-1017 |
| 3739 | 3740 | AD-59376 | GGUCCUAUGCUGCUGGCUUdTdT | AAGCCAGCAGCAUAGGACCdTdT | 1731-1749 |
| 3741 | 3742 | AD-59556 | AGCCUUUGGUUGUGUUGGAdTdT | UCCAACACAACCAAAGGCUdTdT | 1672-1690 |
| 3743 | 3744 | AD-59399 | AAUUCCAUGUGGACUUAGAdTdT | UCUAAGUCCACAUGGAAUUdTdT | 1200-1218 |
| 3745 | 3746 | AD-59474 | CCAGGGCACUGCAAGCAAAdTdT | UUUGCUUGCAGUGCCCUGGdTdT | 640-658 |
| 3747 | 3748 | AD-53542 | cuuuucAGuAuGAucGuuudTsdT | AAACGAUcAuACUGAAAAGdTsdT | 924-942 |
| 3749 | 3750 | AD-59480 | GAAUCAGAGAGGCAGCAGUdTdT | ACUGCUGCCUCUCUGAUUCdTdT | 682-700 |
| 3751 | 3752 | AD-59549 | GCAAAGAUCUGACCCCUCAdTdT | UGAGGGGUCAGAUCUUUGCdTdT | 1441-1459 |
| 3753 | 3754 | AD-59515 | GGAGAAGAGCUCCUACGGAdTdT | UCCGUAGGAGCUCUUCUCCdTdT | 2033-2051 |
| 3755 | 3756 | AD-59427 | CCAUGAGUUUGGAGCAAUCdTdT | GAUUGCUCCAAACUCAUGGdTdT | 1540-1558 |
| 3757 | 3758 | AD-59390 | CUUUGAGAAAAAAAUUGAUdTdT | AUCAAUUUUUUUCUCAAAGdTdT | 943-961 |
| 3759 | 3760 | AD-59511 | UGAGCAGACAUAACAUCUAdTdT | UAGAUGUUAUGUCUGCUCAdTdT | 1980-1998 |
| 3761 | 3762 | AD-59532 | CGUGCAAGCAAUCAAUUACdTdT | GUAAUUGAUUGCUUGCACGdTdT | 1999-2017 |
| 3763 | 3764 | AD-59562 | AAAGCAAAGACCAGAAAGAdTdT | UCUUUCUGGUCUUUGCUUUdTdT | 862-880 |
| 3765 | 3766 | AD-59513 | GGAUGUGCAGGAAAUGAAUdTdT | AUUCAUUUCCUGCACAUCCdTdT | 733-751 |
| 3767 | 3768 | AD-59362 | CAGCAUACUUCCUGAACAUdTdT | AUGUUCAGGAAGUAUGCUGdTdT | 321-339 |
| 3769 | 3770 | AD-53541 | GcAGcAcAGAuGAAucAGAdTsdT | UCUGAUUcAUCUGUGCUGCdTsdT | 671-689 |
| 3771 | 3772 | AD-59490 | UCUGUUGUUCUAUGCCCAAdTdT | UUGGGCAUAGAACAACAGAdTdT | 412-430 |
| 3773 | 3774 | AD-59422 | UGAGACAGAUGCUAAUGGAdTdT | UCCAUUAGCAUCUGUCUCAdTdT | 1869-1887 |
| 3775 | 3776 | AD-59467 | GCCAAUGACUCAACCCUCUdTdT | AGAGGGUUGAGUCAUUGGCdTdT | 1280-1298 |
| 3777 | 3778 | AD-59579 | GAGUGCAACUUCUGCAGGAdTdT | UCCUGCAGAAGUUGCACUCdTdT | 2159-2177 |
| 3779 | 3780 | AD-59426 | GUGAAAGAGAGAAGUCCUAdTdT | UAGGACUUCUCUCUUUCACdTdT | 2202-2220 |
| 3781 | 3782 | AD-59363 | UAACUUGCCAAAAUCUGUUdTdT | AACAGAUUUUGGCAAGUUAdTdT | 901-919 |
| 3783 | 3784 | AD-59436 | AAGCCAGUCUUGAGCUUCAdTdT | UGAAGCUCAAGACUGGCUUdTdT | 711-729 |
| 3785 | 3786 | AD-53536 | cAcuuuucAGuAuGAucGudTsdT | ACGAUcAuACUGAAAAGUGdTsdT | 922-940 |
| 3787 | 3788 | AD-59491 | GCAGCAGUGUCUUCUGCAAdTdT | UUGCAGAAGACACUGCUGCdTdT | 693-711 |
| 3789 | 3790 | AD-59500 | UCCUGAACAUGGAGAGUGUdTdT | ACACUCUCCAUGUUCAGGAdTdT | 330-348 |
| 3791 | 3792 | AD-59394 | AUUUCUGGAACACUUGGCAdTdT | UGCCAAGUGUUCCAGAAAUdTdT | 1652-1670 |
| 3793 | 3794 | AD-59441 | CAGUACACUACCAACAGAUdTdT | AUCUGUUGGUAGUGUACUGdTdT | 492-510 |
| 3795 | 3796 | AD-59365 | GCAUGACCUCAAUUAUUUCdTdT | GAAAUAAUUGAGGUCAUGCdTdT | 2261-2279 |
| 3797 | 3798 | AD-59411 | AGAACUGCUGCAAAGAUCUdTdT | AGAUCUUUGCAGCAGUUCUdTdT | 1432-1450 |
| 3799 | 3800 | AD-59544 | CACCCCAGAUGAUGAACUAdTdT | UAGUUCAUCAUCUGGGGUGdTdT | 2073-2091 |
| 3801 | 3802 | AD-59428 | GAUCCAAGGGAUUCGAAACdTdT | GUUUCGAAUCCCUUGGAUCdTdT | 1363-1381 |
| 3803 | 3804 | AD-59471 | CUCAUCACCAAAAAGCAAGdTdT | CUUGCUUUUUGGUGAUGAGdTdT | 1052-1070 |
| 3805 | 3806 | AD-59518 | ACAACAUGGUGCUGGGGCAdTdT | UGCCCCAGCACCAUGUUGUdTdT | 1150-1168 |
| 3807 | 3808 | AD-53547 | GAucGuuucuuuGAGAAAAdTsdT | UUUUCUcAAAGAAACGAUCdTsdT | 935-953 |
| 3809 | 3810 | AD-59573 | CAGCACGAGUUCUCUGAUUdTdT | AAUCAGAGAACUCGUGCUGdTdT | 1702-1720 |
| 3811 | 3812 | AD-59473 | AAUGAUGUCAGCCACCUCAdTdT | UGAGGUGGCUGACAUCAUUdTdT | 1412-1430 |
| 3813 | 3814 | AD-59412 | AGUUAUGGACACUUUGAAAdTdT | UUUCAAAGUGUCCAUAACUdTdT | 1132-1150 |
| 3815 | 3816 | AD-59522 | GAUGAUGAACUACUUCCUUdTdT | AAGGAAGUAGUUCAUCAUCdTdT | 2080-2098 |
| 3817 | 3818 | AD-59502 | GCAGGAAAUGAAUGCCGUGdTdT | CACGGCAUUCAUUUCCUGCdTdT | 739-757 |
| 3819 | 3820 | AD-59499 | UCUUCAAGAUAACUUGCCAdTdT | UGGCAAGUUAUCUUGAAGAdTdT | 892-910 |
| 3821 | 3822 | AD-59520 | CGAUGGAGGGGAUCCCAGUdTdT | ACUGGGAUCCCCUCCAUCGdTdT | 811-829 |
| 3823 | 3824 | AD-59581 | CCAAAAAGCAAGUGUCAGUdTdT | ACUGACACUUGCUUUUUGGdTdT | 1059-1077 |
| 3825 | 3826 | AD-59461 | GAUUGGGGAUCGGGAUGGAdTdT | UCCAUCCCGAUCCCCAAUCdTdT | 1612-1630 |
| 3827 | 3828 | AD-59370 | CCCUGGAGUCUGUGCGGAUdTdT | AUCCGCACAGACUCCAGGGdTdT | 1791-1809 |
| 3829 | 3830 | AD-53540 | GuuGucuuuAuAuGuGAAudTsdT | AUUcAcAuAuAAAGAcAACdTsdT | 2321-2339 |
| 3831 | 3832 | AD-59574 | CGGGCAUUGUCCACUGCAGdTdT | CUGCAGUGGACAAUGCCCGdTdT | 473-491 |
| 3833 | 3834 | AD-59375 | UAUUCAGACUCCCUCAUCAdTdT | UGAUGAGGGAGUCUGAAUAdTdT | 1040-1058 |
| 3835 | 3836 | AD-59387 | CACUGCAUUUUGAAGUGAUdTdT | AUCACUUCAAAAUGCAGUGdTdT | 2181-2199 |
| 3837 | 3838 | AD-59397 | CCAGAAAGAGUGUCUCAUCdTdT | GAUGAGACACUCUUUCUGGdTdT | 872-890 |
| 3839 | 3840 | AD-59396 | AGGCGGAGGGAUUGGGGAUdTdT | AUCCCCAAUCCCUCCGCCUdTdT | 1603-1621 |
| 3841 | 3842 | AD-59393 | AGACCUCCAUGGGAAAGAUdTdT | AUCUUUCCCAUGGAGGUCUdTdT | 1231-1249 |
| 3843 | 3844 | AD-59483 | GCAGGAGGCCACUGCAUUUdTdT | AAAUGCAGUGGCCUCCUGCdTdT | 2172-2190 |
| 3845 | 3846 | AD-59430 | AUCUGUUUCCACUUUUCAGdTdT | CUGAAAAGUGGAAACAGAUdTdT | 913-931 |
| 3847 | 3848 | AD-59463 | AGAGAAGUCCUAUUUCUCAdTdT | UGAGAAAUAGGACUUCUCUdTdT | 2209-2227 |
| 3849 | 3850 | AD-53534 | GucuucAGAGuuGucuuuAdTsdT | uAAAGAcAACUCUGAAGACdTsdT | 2312-2330 |
| 3851 | 3852 | AD-59514 | GGCUGGAACUGAAGCCUCAdTdT | UGAGGCUUCAGUUCCAGCCdTdT | 2130-2148 |
| 3853 | 3854 | AD-59575 | GCCAUUAUCAUAUCCAGAUdTdT | AUCUGGAUAUGAUAAUGGCdTdT | 2292-2310 |
| 3855 | 3856 | AD-59364 | AGCAGGCCCCAGUGUGGUUdTdT | AACCACACUGGGGCCUGCUdTdT | 781-799 |
| 3857 | 3858 | AD-59402 | UCAGCUGAGUGCAACUUCUdTdT | AGAAGUUGCACUCAGCUGAdTdT | 2153-2171 |
| 3859 | 3860 | AD-59479 | GAGCACACAUCUUCCCCAUdTdT | AUGGGGAAGAUGUGUGCUCdTdT | 1011-1029 |
| 3861 | 3862 | AD-59481 | ACUUCCAGGACAUCAUGCAdTdT | UGCAUGAUGUCCUGGAAGUdTdT | 843-861 |
| 3863 | 3864 | AD-59530 | CCUAUCGAGUUUUUAAAACdTdT | GUUUUAAAAACUCGAUAGGdTdT | 981-999 |
| 3865 | 3866 | AD-59582 | CUUCCUUGAGAAUCUGCUAdTdT | UAGCAGAUUCUCAAGGAAGdTdT | 2092-2110 |
| 3867 | 3868 | AD-59506 | ACCAACAGAUCAAAGAAACdTdT | GUUUCUUUGAUCUGUUGGUdTdT | 501-519 |
| 3869 | 3870 | AD-59567 | UAACCCCAGGCCAUUAUCAdTdT | UGAUAAUGGCCUGGGGUUAdTdT | 2283-2301 |
| 3871 | 3872 | AD-59485 | CCAUGCCUCCAUGAUCCAAdTdT | UUGGAUCAUGGAGGCAUGGdTdT | 1351-1369 |
| 3873 | 3874 | AD-59525 | UGAUGAACUAAUGAGCAGAdTdT | UCUGCUCAUUAGUUCAUCAdTdT | 1969-1987 |
| 3875 | 3876 | AD-59566 | CCUGAAGAGCGCUGAGGGAdTdT | UCCCUCAGCGCUCUUCAGGdTdT | 1810-1828 |
| 3877 | 3878 | AD-59580 | AACACUUGGCAAAGCCUUUdTdT | AAAGGCUUUGCCAAGUGUUdTdT | 1660-1678 |
| 3879 | 3880 | AD-59512 | UCUGCAGAAAGCAGGCAAAdTdT | UUUGCCUGCUUUCUGCAGAdTdT | 391-409 |
| 3881 | 3882 | AD-59475 | CCGGCCUCCCUGUUGUCCAdTdT | UGGACAACAGGGAGGCCGGdTdT | 1890-1908 |
| 3883 | 3884 | AD-59438 | CAUCAUCCCUGUGCGGGUUdTdT | AACCCGCACAGGGAUGAUGdTdT | 1921-1939 |
| 3885 | 3886 | AD-59442 | UGUGCGGGUUGCAGAUGCUdTdT | AGCAUCUGCAACCCGCACAdTdT | 1930-1948 |
| 3887 | 3888 | AD-59516 | GGAAAGAGGUUGCUGAAACdTdT | GUUUCAGCAACCUCUUUCCdTdT | 759-777 |
| 3889 | 3890 | AD-59429 | AGGUCCACGCAGUGGGGCUdTdT | AGCCCCACUGCGUGGACCUdTdT | 1572-1590 |
| 3891 | 3892 | AD-59510 | UGCCGUGAGGAAAGAGGUUdTdT | AACCUCUUUCCUCACGGCAdTdT | 751-769 |
| 3893 | 3894 | AD-59457 | GCUAAUGGAUGCCGGCCUCdTdT | GAGGCCGGCAUCCAUUAGCdTdT | 1879-1897 |
| 3895 | 3896 | AD-59434 | GAAGCAAGUGGGGCUGGAAdTdT | UUCCAGCCCCACUUGCUUCdTdT | 2119-2137 |
| 3897 | 3898 | AD-59454 | CAUCUUCCGCCACAAUGAUdTdT | AUCAUUGUGGCGGAAGAUGdTdT | 1399-1417 |
| 3899 | 3900 | AD-59468 | AUUUCUCAGGCUUGAGCAAdTdT | UUGCUCAAGCCUGAGAAAUdTdT | 2220-2238 |
| 3901 | 3902 | AD-59565 | CCCGAGUCCCCCAGGCCUUdTdT | AAGGCCUGGGGGACUCGGGdTdT | 372-390 |
| 3903 | 3904 | AD-59416 | CAAGCAAAUGCCCUUUCCUdTdT | AGGAAAGGGCAUUUGCUUGdTdT | 651-669 |
| 3905 | 3906 | AD-59420 | CCCCUCAGUCCCCAAGAUUdTdT | AAUCUUGGGGACUGAGGGGdTdT | 1453-1471 |
| 3907 | 3908 | AD-59552 | CUACGGUGCCCCGGGGAGAdTdT | UCUCCCCGGGGCACCGUAGdTdT | 2019-2037 |
| 3909 | 3910 | AD-59558 | AAAACUGCCCCAAGAUGAUdTdT | AUCAUCUUGGGGCAGUUUUdTdT | 429-447 |
| 3911 | 3912 | AD-59404 | ACAAAACUGCUAAGGCCAAdTdT | UUGGCCUUAGCAGUUUUGUdTdT | 540-558 |
| 3913 | 3914 | AD-59455 | GAUUCUGGGAACCAUGCCUdTdT | AGGCAUGGUUCCCAGAAUCdTdT | 1340-1358 |
| 3915 | 3916 | AD-59496 | CCAGAUGGCACACAGCUUCdTdT | GAAGCUGUGUGCCAUCUGGdTdT | 593-611 |
| 3917 | 3918 | AD-59446 | AGGGAUUCGAAACAGCCGAdTdT | UCGGCUGUUUCGAAUCCCUdTdT | 1369-1387 |
| 3919 | 3920 | AD-59435 | CUCUGCAGUCCUCAGCGCAdTdT | UGCGCUGAGGACUGCAGAGdTdT | 109-127 |
| 3921 | 3922 | AD-59419 | CCGCCGCCUCUGCAGUCCUdTdT | AGGACUGCAGAGGCGGCGGdTdT | 102-120 |
| 3923 | 3924 | AD-59533 | CUGGCUGGAGCCCUGGAGUdTdT | ACUCCAGGGCUCCAGCCAGdTdT | 1781-1799 |
| 3925 | 3926 | AD-59366 | GACAUCAUGCAAAAGCAAAdTdT | UUUGCUUUUGCAUGAUGUCdTdT | 851-869 |
| 3927 | 3928 | AD-59521 | GCUUGAGCAAGUUGGUAUCdTdT | GAUACCAACUUGCUCAAGCdTdT | 2229-2247 |
| 3929 | 3930 | AD-59563 | CAGGCUGUGAGAUUUACUCdTdT | GAGUAAAUCUCACAGCCUGdTdT | 1320-1338 |
| 3931 | 3932 | AD-59534 | AGAGCUGUGUGAUGUGGCCdTdT | GGCCACAUCACACAGCUCUdTdT | 1522-1540 |
| 3933 | 3934 | AD-59407 | GGAGCUGGCAGACCUCCAUdTdT | AUGGAGGUCUGCCAGCUCCdTdT | 1222-1240 |
| 3935 | 3936 | AD-59445 | AUCCCAGUGGACUGCUGAAdTdT | UUCAGCAGUCCACUGGGAUdTdT | 822-840 |
| 3937 | 3938 | AD-59546 | GUCAAACUCAUGAGACAGAdTdT | UCUGUCUCAUGAGUUUGACdTdT | 1859-1877 |
| 3939 | 3940 | AD-59456 | CUUUCCUGGCAGCACAGAUdTdT | AUCUGUGCUGCCAGGAAAGdTdT | 663-681 |
| 3941 | 3942 | AD-59503 | CCCUCCGGCCAGUGAGAAAdTdT | UUUCUCACUGGCCGGAGGGdTdT | 520-538 |
| 3943 | 3944 | AD-59536 | CUACCUAGGAAUGAGUCGCdTdT | GCGACUCAUUCCUAGGUAGdTdT | 1093-1111 |
| 3945 | 3946 | AD-59385 | CCCAAGAUUGUGGCAUUUGdTdT | CAAAUGCCACAAUCUUGGGdTdT | 1463-1481 |
| 3947 | 3948 | AD-59367 | GAGCAAUCACCUUCGUGGAdTdT | UCCACGAAGGUGAUUGCUCdTdT | 1551-1569 |
| 3949 | 3950 | AD-59458 | UGCCCAUUCUUAUCCCGAGdTdT | CUCGGGAUAAGAAUGGGCAdTdT | 359-377 |
| 3951 | 3952 | AD-59381 | AAGGCCAAGGUCCAACAGAdTdT | UCUGUUGGACCUUGGCCUUdTdT | 551-569 |
| 3953 | 3954 | AD-59538 | CACACAGCUUCCGUCUGGAdTdT | UCCAGACGGAAGCUGUGUGdTdT | 601-619 |
| 3955 | 3956 | AD-59421 | UUAUGGGGCUCGAGGCGGAdTdT | UCCGCCUCGAGCCCCAUAAdTdT | 1591-1609 |
| 3957 | 3958 | AD-59388 | UGUCUUCUGCAAAGCCAGUdTdT | ACUGGCUUUGCAGAAGACAdTdT | 700-718 |
| 3959 | 3960 | AD-59444 | AGGCCUGAGCAUGACCUCAdTdT | UGAGGUCAUGCUCAGGCCUdTdT | 2253-2271 |
| 3961 | 3962 | AD-59528 | AUGUGAAUUAAGUUAUAUUdTdT | AAUAUAACUUAAUUCACAUdTdT | 2332-2350 |
| 3963 | 3964 | AD-59498 | ACUGCUGAAGAACUUCCAGdTdT | CUGGAAGUUCUUCAGCAGUdTdT | 832-850 |
| 3965 | 3966 | AD-59497 | UGAGAAAGACAAAACUGCUdTdT | AGCAGUUUUGUCUUUCUCAdTdT | 532-550 |
| 3967 | 3968 | AD-59384 | UCAGCCACCUCAGAGAACUdTdT | AGUUCUCUGAGGUGGCUGAdTdT | 1419-1437 |
| 3969 | 3970 | AD-59452 | GGCAACGAGCGUUUCGUUUdTdT | AAACGAAACGCUCGUUGCCdTdT | 51-69 |
| 3971 | 3972 | AD-59379 | CCUGAUGGAUCCCAGCAGAdTdT | UCUGCUGGGAUCCAUCAGGdTdT | 572-590 |
| 3973 | 3974 | AD-59529 | UGUGCCCACUGGAAGAGCUdTdT | AGCUCUUCCAGUGGGCACAdTdT | 1509-1527 |
| 3975 | 3976 | AD-59389 | CCACAGGAGCCAGCAUACUdTdT | AGUAUGCUGGCUCCUGUGGdTdT | 311-329 |
| 3977 | 3978 | AD-59585 | GUGGUACUAGAAAUAUUUCdTdT | GAAAUAUUUCUAGUACCACdTdT | 1170-1188 |
| 3979 | 3980 | AD-59570 | UUCGCCGCUGCCCAUUCUUdTdT | AAGAAUGGGCAGCGGCGAAdTdT | 351-369 |
| 3981 | 3982 | AD-59415 | CCGCCAGCACCAGCGCAACdTdT | GUUGCGCUGGUGCUGGCGGdTdT | 1840-1858 |
| 3983 | 3984 | AD-59505 | CGCUGAGGGACGGGUGCUUdTdT | AAGCACCCGUCCCUCAGCGdTdT | 1819-1837 |
| 3985 | 3986 | AD-59557 | UGGACUUCUCGACUUGAGUdTdT | ACUCAAGUCGAGAAGUCCAdTdT | 69-87 |
| 3987 | 3988 | AD-59548 | AAAGAAACCCCUCCGGCCAdTdT | UGGCCGGAGGGGUUUCUUUdTdT | 512-530 |
| 3989 | 3990 | AD-59487 | UUGACACCGUACGGUCCUAdTdT | UAGGACCGUACGGUGUCAAdTdT | 1719-1737 |
| 3991 | 3992 | AD-59550 | CCCUCUUCACCCUGGCUAAdTdT | UUAGCCAGGGUGAAGAGGGdTdT | 1293-1311 |
| 3993 | 3994 | AD-59572 | CCCCCAGGCCUUUCUGCAGdTdT | CUGCAGAAAGGCCUGGGGGdTdT | 379-397 |
| 3995 | 3996 | AD-59554 | AUGCCCAAAACUGCCCCAAdTdT | UUGGGGCAGUUUUGGGCAUdTdT | 423-441 |
| 3997 | 3998 | AD-59437 | CUUGAGUGCCCGCCUCCUUdTdT | AAGGAGGCGGGCACUCAAGdTdT | 81-99 |
| 3999 | 4000 | AD-59584 | GGGUACAUCGCCAGCACGAdTdT | UCGUGCUGGCGAUGUACCCdTdT | 1691-1709 |
| 4001 | 4002 | AD-59373 | GUGUGGGGCAGUUAUGGACdTdT | GUCCAUAACUGCCCCACACdTdT | 1123-1141 |
| 4003 | 4004 | AD-59545 | ACAUAGUCCUGGAAAUAAAdTdT | UUUAUUUCCAGGACUAUGUdTdT | 2372-2390 |
| 4005 | 4006 | AD-59547 | AUCCCAGCAGAGUCCAGAUdTdT | AUCUGGACUCUGCUGGGAUdTdT | 580-598 |
| 4007 | 4008 | AD-59470 | CUAGAUUCUUUCCACAGGAdTdT | UCCUGUGGAAAGAAUCUAGdTdT | 300-318 |
| 4009 | 4010 | AD-59417 | UUGUUUUCCUCGUGCUUUGdTdT | CAAAGCACGAGGAAAACAAdTdT | 1259-1277 |
| 4011 | 4012 | AD-59535 | CCUCCUUCGCCGCCGCCUCdTdT | GAGGCGGCGGCGAAGGAGGdTdT | 93-111 |
| 4013 | 4014 | AD-59507 | UGAGGCUGCUCCCGGACAAdTdT | UUGUCCGGGAGCAGCCUCAdTdT | 31-49 |
| 4015 | 4016 | AD-59519 | CCAACAGACUCCUGAUGGAdTdT | UCCAUCAGGAGUCUGUUGGdTdT | 562-580 |
| 4017 | 4018 | AD-59391 | UCACAUGGAAGCAAGUGGGdTdT | CCCACUUGCUUCCAUGUGAdTdT | 2112-2130 |
| 4019 | 4020 | AD-59537 | CAUUCAAUGGAUGGGGCGGdTdT | CCGCCCCAUCCAUUGAAUGdTdT | 1490-1508 |
| 4021 | 4022 | AD-59450 | AGGAAUGAGUCGCCACCCAdTdT | UGGGUGGCGACUCAUUCCUdTdT | 1099-1117 |
| 4023 | 4024 | AD-59449 | UGGACUUAGAGCGGGAGCUdTdT | AGCUCCCGCUCUAAGUCCAdTdT | 1209-1227 |
| 4025 | 4026 | AD-59418 | CUAAAAACACAGAAGUCUGdTdT | CAGACUUCUGUGUUUUUAGdTdT | 1950-1968 |
| 4027 | 4028 | AD-59561 | CCCUCACCACACACCCCAGdTdT | CUGGGGUGUGUGGUGAGGGdTdT | 2062-2080 |
| 4029 | 4030 | AD-59460 | AAUCCUUGCUUCAGGGACUdTdT | AGUCCCUGAAGCAAGGAUUdTdT | 171-189 |
| 4031 | 4032 | AD-59409 | UUGUGGCAUUUGAAACUGUdTdT | ACAGUUUCAAAUGCCACAAdTdT | 1470-1488 |
| 4033 | 4034 | AD-59476 | UCAAUUACCCUACGGUGCCdTdT | GGCACCGUAGGGUAAUUGAdTdT | 2010-2028 |
| 4035 | 4036 | AD-59406 | CAAGCCAGCCCCUCGGGCAdTdT | UGCCCGAGGGGCUGGCUUGdTdT | 460-478 |
| 4037 | 4038 | AD-59569 | GAGUCUUCCCUGCCUGGAUdTdT | AUCCAGGCAGGGAAGACUCdTdT | 259-277 |
| 4039 | 4040 | AD-59451 | UGGAGAGUGUUGUUCGCCGdTdT | CGGCGAACAACACUCUCCAdTdT | 339-357 |
| 4041 | 4042 | AD-59553 | ACCCCUUGCCUGCCACAAGdTdT | CUUGUGGCAGGCAAGGGGUdTdT | 621-639 |
| 4043 | 4044 | AD-59372 | CUGGAUGGAUGAGUGGCUUdTdT | AAGCCACUCAUCCAUCCAGdTdT | 272-290 |
| 4045 | 4046 | AD-59377 | CAAGAUGAUGGAAGUUGGGdTdT | CCCAACUUCCAUCAUCUUGdTdT | 439-457 |
| 4047 | 4048 | AD-59531 | UUUCGUUUGGACUUCUCGAdTdT | UCGAGAAGUCCAAACGAAAdTdT | 62-80 |
| 4049 | 4050 | AD-59560 | UCAUCUUCACCACCUCUCUdTdT | AGAGAGGUGGUGAAGAUGAdTdT | 1749-1767 |
| 4051 | 4052 | AD-59489 | UGCCCAGUUCUUCCCGCUGdTdT | CAGCGGGAAGAACUGGGCAdTdT | 132-150 |
| 4053 | 4054 | AD-59540 | AAAAAUGGACAUCAUUUCUdTdT | AGAAAUGAUGUCCAUUUUUdTdT | 1639-1657 |
| 4055 | 4056 | AD-59378 | CUUGAGCUUCAGGAGGAUGdTdT | CAUCCUCCUGAAGCUCAAGdTdT | 719-737 |
| 4057 | 4058 | AD-59403 | CCUCUCUGCCACCCAUGCUdTdT | AGCAUGGGUGGCAGAGAGGdTdT | 1761-1779 |
| 4059 | 4060 | AD-59493 | AAAGUCAGGAUCCCUAAGAdTdT | UCUUAGGGAUCCUGACUUUdTdT | 242-260 |
| 4061 | 4062 | AD-59374 | CGACCACGGAGGAAUCCUUdTdT | AAGGAUUCCUCCGUGGUCGdTdT | 159-177 |
| 4063 | 4064 | AD-59380 | UUCCGUCUGGACACCCCUUdTdT | AAGGGGUGUCCAGACGGAAdTdT | 609-627 |
| 4065 | 4066 | AD-59576 | CCACCCAUGCUGCUGGCUGdTdT | CAGCCAGCAGCAUGGGUGGdTdT | 1769-1787 |
| 4067 | 4068 | AD-59425 | UGAGAAAAAGAAUGACCACdTdT | GUGGUCAUUCUUUUUCUCAdTdT | 961-979 |
| 4069 | 4070 | AD-59509 | UAAGAUGAUGCCAGGCUGUdTdT | ACAGCCUGGCAUCAUCUUAdTdT | 1309-1327 |
| 4071 | 4072 | AD-59488 | AGUUAUAUUAAAUUUUAAUdTdT | AUUAAAAUUUAAUAUAACUdTdT | 2342-2360 |
| 4073 | 4074 | AD-59486 | UCUUCCCGCUGUGGGGACAdTdT | UGUCCCCACAGCGGGAAGAdTdT | 140-158 |
| 4075 | 4076 | AD-59465 | UGCCACAAGCCAGGGCACUdTdT | AGUGCCCUGGCUUGUGGCAdTdT | 631-649 |
| 4077 | 4078 | AD-59484 | AGCGCAGUUAUGCCCAGUUdTdT | AACUGGGCAUAACUGCGCUdTdT | 122-140 |
| 4079 | 4080 | AD-59368 | GGACCAGGAGAAAGUCAGGdTdT | CCUGACUUUCUCCUGGUCCdTdT | 232-250 |
| 4081 | 4082 | AD-59464 | UGUCCACUGCCCCAGCCACdTdT | GUGGCUGGGGCAGUGGACAdTdT | 1903-1921 |
| 4083 | 4084 | AD-59386 | AUCGCGGCCUGAGGCUGCUdTdT | AGCAGCCUCAGGCCGCGAUdTdT | 22-40 |
| 4085 | 4086 | AD-59439 | GGGGAUGUGGGGACCAGGAdTdT | UCCUGGUCCCCACAUCCCCdTdT | 222-240 |
| 4087 | 4088 | AD-59440 | CUGGAAAUAAAUUCUUGCUdTdT | AGCAAGAAUUUAUUUCCAGdTdT | 2380-2398 |
| 4089 | 4090 | AD-59542 | UUGAAACUGUCCAUUCAAUdTdT | AUUGAAUGGACAGUUUCAAdTdT | 1479-1497 |
| 4091 | 4092 | AD-59559 | GUGGGGACACGACCACGGAdTdT | UCCGUGGUCGUGUCCCCACdTdT | 150-168 |
| 4093 | 4094 | AD-59586 | CGCAGUGGGGCUUUAUGGGdTdT | CCCAUAAAGCCCCACUGCGdTdT | 1579-1597 |
| 4095 | 4096 | AD-59408 | UUGUCUUUAUAUGUGAAUUdTdT | AAUUCACAUAUAAAGACAAdTdT | 2322-2340 |
| 4097 | 4098 | AD-59568 | UCACCCUGGCUAAGAUGAUdTdT | AUCAUCUUAGCCAGGGUGAdTdT | 1299-1317 |
| 4099 | 4100 | AD-59398 | GUAUCUGCUCAGGCCUGAGdTdT | CUCAGGCCUGAGCAGAUACdTdT | 2243-2261 |
| 4101 | 4102 | AD-59508 | AUGAGUGGCUUCUUCUCCAdTdT | UGGAGAAGAAGCCACUCAUdTdT | 280-298 |
| 4103 | 4104 | AD-59523 | GAAGUUGGGGCCAAGCCAGdTdT | CUGGCUUGGCCCCAACUUCdTdT | 449-467 |
| 4105 | 4106 | AD-59410 | UCAGGGACUCGGGACCCUGdTdT | CAGGGUCCCGAGUCCCUGAdTdT | 181-199 |
| 4107 | 4108 | AD-59541 | UCCUACGGAUUGCCCCCACdTdT | GUGGGGGCAAUCCGUAGGAdTdT | 2043-2061 |
| 4109 | 4110 | AD-59524 | UUACUCUGAUUCUGGGAACdTdT | GUUCCCAGAAUCAGAGUAAdTdT | 1333-1351 |
| 4111 | 4112 | AD-59501 | AUCCCUAAGAGUCUUCCCUdTdT | AGGGAAGACUCUUAGGGAUdTdT | 251-269 |
| 4113 | 4114 | AD-59383 | UGCCAAAGUACAUCUUCCGdTdT | CGGAAGAUGUACUUUGGCAdTdT | 1389-1407 |
| 4115 | 4116 | AD-59577 | UCCUCGGGUUUAGGGGAUGdTdT | CAUCCCCUAAACCCGAGGAdTdT | 210-228 |
| 4117 | 4118 | AD-59447 | UGCUGAAACCUCAGCAGGCdTdT | GCCUGCUGAGGUUUCAGCAdTdT | 769-787 |
| 4119 | 4120 | AD-59555 | CCACCCACGGGUGUGUGGGdTdT | CCCACACACCCGUGGGUGGdTdT | 1111-1129 |
| 4121 | 4122 | AD-59405 | UGGUGCAGUAAUGACUACCdTdT | GGUAGUCAUUACUGCACCAdTdT | 1079-1097 |
| 4123 | 4124 | AD-59371 | UUCUCCACCUAGAUUCUUUdTdT | AAAGAAUCUAGGUGGAGAAdTdT | 292-310 |
| 4125 | 4126 | AD-59443 | UAAGGCGCCGGCGAUCGCGdTdT | CGCGAUCGCCGGCGCCUUAdTdT | 9-27 |
| 4127 | 4128 | AD-59401 | UGGAACUAGUAAAUUCCAUdTdT | AUGGAAUUUACUAGUUCCAdTdT | 1189-1207 |
| 4129 | 4130 | AD-59494 | GGACCCUGCUGGACCCCUUdTdT | AAGGGGUCCAGCAGGGUCCdTdT | 192-210 |
| 4131 | 4132 | AD-59504 | UCAAUUAUUUCACUUAACCdTdT | GGUUAAGUGAAAUAAUUGAdTdT | 2269-2287 |
| 4133 | 4134 | AD-59369 | CCCGGACAAGGGCAACGAGdTdT | CUCGUUGCCCUUGUCCGGGdTdT | 41-59 |
| 4135 | 4136 | AD-59571 | UUUUAAAACUGUGAACCGGdTdT | CCGGUUCACAGUUUUAAAAdTdT | 991-1009 |
| 4137 | 4138 | AD-59527 | GUGCUUCGCCGCCAGCACCdTdT | GGUGCUGGCGGCGAAGCACdTdT | 1832-1850 |
| 4139 | 4140 | AD-59466 | UGGACCCCUUCCUCGGGUUdTdT | AACCCGAGGAAGGGGUCCAdTdT | 201-219 |
| 4141 | 4142 | AD-59526 | CUGUAUAUUAAGGCGCCGGdTdT | CCGGCGCCUUAAUAUACAGdTdT | 1-19 |
| 4143 | 4144 | AD-59543 | UUGCCCCCACCCCUCACCAdTdT | UGGUGAGGGGUGGGGGCAAdTdT | 2052-2070 |
| 4145 | 4146 | AD-59564 | AUGGGGCGGUGUGCCCACUdTdT | AGUGGGCACACCGCCCCAUdTdT | 1500-1518 |
| 4147 | 4148 | AD-59583 | CUAUAGUAAAAACAUAGUCdTdT | GACUAUGUUUUUACUAUAGdTdT | 2361-2379 |

[0899] The in vitro activity of the siRNAs in suppressing ALAS1 mRNA was tested in a single dose screen in Hep3B cells that were transfected using Lipofectamine2000 as a transfection reagent. Single dose experiments were performed at 10 nM duplex concentration and analyzed by branched DNA (bDNA) assay. The results are shown in Table 19 and are expressed as percent remaining mRNA.

TABLE 19
Suppression of ALAS1 mRNA as assessed by bDNA assay

| | % remaining | |
|---|---|---|
| Duplex | mRNA | SD |
| AD-59453 | 11.2 | 1.5 |
| AD-59395 | 12.7 | 1.1 |
| AD-59477 | 14.5 | 2.0 |
| AD-59492 | 14.8 | 2.1 |
| AD-59361 | 15.1 | 4.9 |
| AD-59462 | 15.4 | 2.6 |
| AD-59433 | 15.8 | 2.7 |
| AD-59424 | 16.0 | 1.7 |
| AD-59414 | 16.1 | 1.3 |
| AD-59539 | 16.2 | 2.6 |
| AD-59400 | 16.2 | 1.8 |
| AD-59551 | 16.3 | 2.3 |
| AD-59482 | 16.6 | 2.1 |
| AD-59448 | 16.6 | 3.7 |
| AD-59392 | 16.9 | 3.5 |
| AD-59469 | 16.9 | 2.2 |
| AD-59431 | 17.0 | 2.0 |
| AD-59423 | 17.1 | 3.8 |
| AD-59517 | 17.2 | 1.5 |
| AD-59578 | 17.3 | 3.1 |
| AD-59495 | 17.7 | 3.7 |
| AD-59432 | 17.7 | 2.8 |
| AD-59382 | 17.9 | 3.2 |
| AD-59472 | 18.6 | 3.5 |
| AD-59459 | 18.7 | 3.8 |
| AD-59413 | 18.8 | 2.4 |
| AD-59478 | 18.9 | 3.0 |
| AD-59376 | 18.9 | 3.2 |
| AD-59556 | 18.9 | 2.4 |
| AD-59399 | 19.0 | 4.1 |
| AD-59474 | 19.4 | 1.6 |
| AD-53542 | 19.4 | 1.7 |
| AD-59480 | 19.6 | 1.6 |
| AD-59549 | 19.7 | 2.1 |
| AD-59515 | 19.8 | 4.4 |
| AD-59427 | 19.9 | 3.2 |
| AD-59390 | 19.9 | 3.4 |
| AD-59511 | 19.9 | 2.2 |
| AD-59532 | 20.0 | 2.4 |
| AD-59562 | 20.2 | 2.6 |
| AD-59513 | 20.3 | 3.9 |
| AD-59362 | 20.6 | 2.5 |
| AD-53541 | 20.6 | 2.2 |
| AD-59490 | 20.7 | 2.3 |
| AD-59422 | 20.8 | 4.5 |
| AD-59467 | 21.2 | 2.3 |
| AD-59579 | 21.2 | 3.3 |
| AD-59426 | 21.7 | 2.3 |
| AD-59363 | 21.7 | 2.7 |
| AD-59436 | 21.7 | 2.7 |
| AD-53536 | 21.9 | 1.5 |
| AD-59491 | 21.9 | 2.6 |
| AD-59500 | 22.2 | 2.8 |
| AD-59394 | 22.3 | 10.1 |
| AD-59441 | 22.3 | 2.6 |
| AD-59365 | 22.4 | 4.2 |
| AD-59411 | 22.5 | 2.9 |
| AD-59544 | 22.5 | 2.1 |
| AD-59428 | 22.7 | 4.7 |
| AD-59471 | 22.9 | 5.0 |
| AD-59518 | 22.9 | 2.3 |
| AD-53547 | 22.9 | 1.5 |
| AD-59573 | 23.0 | 4.2 |
| AD-59473 | 23.2 | 1.8 |
| AD-59412 | 23.4 | 2.5 |
| AD-59522 | 23.4 | 3.3 |
| AD-59502 | 23.6 | 2.7 |
| AD-59499 | 23.6 | 1.6 |
| AD-59520 | 23.8 | 3.8 |
| AD-59581 | 23.9 | 6.0 |
| AD-59461 | 24.3 | 4.2 |
| AD-59370 | 24.3 | 5.6 |
| AD-53540 | 24.4 | 2.1 |
| AD-59574 | 24.5 | 2.0 |
| AD-59375 | 24.6 | 2.3 |
| AD-59387 | 24.8 | 7.2 |
| AD-59397 | 24.9 | 9.6 |
| AD-59396 | 25.0 | 10.2 |
| AD-59393 | 25.3 | 11.6 |
| AD-59483 | 25.4 | 3.8 |
| AD-59430 | 25.5 | 1.8 |
| AD-59463 | 25.6 | 4.8 |
| AD-53534 | 25.9 | 3.1 |
| AD-59514 | 26.2 | 5.7 |
| AD-59575 | 26.2 | 3.2 |
| AD-59364 | 26.2 | 4.5 |
| AD-59402 | 26.3 | 3.1 |
| AD-59479 | 26.3 | 2.5 |
| AD-59481 | 26.4 | 2.2 |
| AD-59530 | 26.4 | 4.4 |
| AD-59582 | 26.6 | 3.9 |
| AD-59506 | 27.0 | 4.1 |
| AD-59567 | 27.3 | 1.1 |
| AD-59485 | 27.7 | 4.7 |
| AD-59525 | 28.3 | 3.1 |
| AD-59566 | 28.5 | 0.6 |
| AD-59580 | 28.7 | 7.1 |
| AD-59512 | 29.5 | 2.5 |
| AD-59475 | 29.6 | 4.2 |
| AD-59438 | 29.6 | 3.3 |
| AD-59442 | 29.9 | 2.8 |
| AD-59516 | 30.4 | 3.8 |
| AD-59429 | 30.8 | 4.3 |
| AD-59510 | 31.3 | 1.9 |
| AD-59457 | 31.4 | 1.2 |
| AD-59434 | 31.6 | 3.5 |
| AD-59454 | 32.0 | 1.9 |
| AD-59468 | 32.2 | 3.2 |
| AD-59565 | 32.4 | 1.5 |
| AD-59416 | 32.7 | 1.7 |
| AD-59420 | 33.2 | 3.1 |
| AD-59552 | 33.2 | 2.2 |
| AD-59558 | 33.8 | 3.8 |
| AD-59404 | 34.0 | 5.4 |
| AD-59455 | 34.8 | 1.3 |
| AD-59496 | 34.9 | 5.2 |
| AD-59446 | 35.5 | 1.7 |
| AD-59435 | 35.9 | 1.2 |
| AD-59419 | 36.0 | 1.4 |
| AD-59533 | 36.7 | 3.7 |
| AD-59366 | 36.7 | 6.0 |
| AD-59521 | 36.9 | 4.3 |
| AD-59563 | 36.9 | 4.1 |
| AD-59534 | 36.9 | 3.3 |
| AD-59407 | 37.1 | 4.7 |
| AD-59445 | 37.2 | 3.2 |
| AD-59546 | 37.9 | 4.9 |
| AD-59456 | 38.3 | 4.0 |
| AD-59503 | 38.8 | 5.0 |
| AD-59536 | 39.8 | 4.2 |
| AD-59385 | 39.9 | 13.7 |
| AD-59367 | 40.0 | 3.6 |
| AD-59458 | 40.0 | 3.4 |
| AD-59381 | 40.3 | 9.9 |
| AD-59538 | 40.8 | 4.9 |
| AD-59421 | 40.9 | 6.4 |
| AD-59388 | 41.0 | 9.1 |
| AD-59444 | 41.1 | 2.7 |
| AD-59528 | 41.9 | 3.3 |
| AD-59498 | 42.2 | 3.3 |
| AD-59497 | 42.4 | 4.9 |
| AD-59384 | 42.7 | 17.6 |
| AD-59452 | 42.7 | 3.1 |
| AD-59379 | 43.6 | 2.6 |
| AD-59529 | 43.8 | 4.8 |
| AD-59389 | 44.1 | 6.4 |
| AD-59585 | 44.3 | 3.2 |
| AD-59570 | 45.1 | 4.0 |
| AD-59415 | 46.6 | 2.3 |
| AD-59505 | 47.5 | 6.2 |
| AD-59557 | 48.1 | 4.4 |
| AD-59548 | 49.9 | 4.0 |
| AD-59487 | 50.7 | 3.2 |
| AD-59550 | 50.8 | 5.8 |
| AD-59572 | 51.1 | 4.0 |
| AD-59554 | 51.3 | 6.0 |
| AD-59437 | 52.2 | 4.8 |
| AD-59584 | 54.9 | 2.7 |
| AD-59373 | 55.3 | 20.1 |
| AD-59545 | 55.4 | 3.4 |
| AD-59547 | 55.9 | 4.7 |
| AD-59470 | 56.0 | 2.7 |
| AD-59417 | 56.4 | 7.7 |
| AD-59535 | 57.6 | 5.1 |
| AD-59507 | 58.8 | 4.7 |
| AD-59519 | 59.1 | 5.6 |
| AD-59391 | 60.1 | 12.5 |
| AD-59537 | 60.6 | 9.1 |
| AD-59450 | 60.7 | 7.2 |
| AD-59449 | 61.6 | 6.8 |
| AD-59418 | 61.8 | 8.4 |
| AD-59561 | 62.2 | 7.2 |
| AD-59460 | 62.8 | 4.7 |
| AD-59409 | 64.4 | 9.0 |
| AD-59476 | 65.2 | 5.6 |
| AD-59406 | 65.6 | 3.5 |
| AD-59569 | 66.7 | 7.6 |
| AD-59451 | 66.9 | 2.9 |
| AD-59553 | 67.2 | 8.8 |
| AD-59372 | 67.3 | 25.6 |
| AD-59377 | 68.7 | 5.1 |
| AD-59531 | 68.7 | 9.0 |
| AD-59560 | 68.7 | 12.7 |
| AD-59489 | 69.6 | 8.9 |
| AD-59540 | 70.1 | 10.1 |
| AD-59378 | 70.6 | 14.1 |
| AD-59403 | 71.4 | 3.3 |
| AD-59493 | 72.3 | 3.5 |
| AD-59374 | 75.9 | 5.1 |
| AD-59380 | 76.4 | 11.1 |
| AD-59576 | 77.5 | 16.2 |
| AD-59425 | 77.9 | 10.6 |
| AD-59509 | 78.0 | 3.2 |
| AD-59488 | 78.6 | 7.1 |
| AD-59486 | 79.4 | 5.0 |
| AD-59465 | 79.5 | 5.1 |
| AD-59484 | 79.8 | 3.2 |
| AD-59368 | 80.0 | 11.9 |
| AD-59464 | 80.2 | 9.3 |
| AD-59386 | 80.6 | 33.2 |
| AD-59439 | 80.9 | 4.0 |
| AD-59440 | 82.2 | 1.9 |
| AD-59542 | 83.3 | 10.6 |
| AD-59559 | 83.7 | 9.1 |
| AD-59586 | 83.8 | 11.5 |
| AD-59408 | 86.3 | 2.8 |
| AD-59568 | 86.8 | 4.2 |
| AD-59398 | 87.4 | 24.9 |
| AD-59508 | 87.5 | 2.5 |
| AD-59523 | 87.6 | 11.8 |
| AD-59410 | 88.8 | 8.3 |
| AD-59541 | 88.9 | 10.8 |
| AD-59524 | 89.5 | 12.1 |
| AD-59501 | 89.9 | 5.1 |
| AD-59383 | 90.8 | 27.4 |
| AD-59577 | 91.1 | 2.3 |
| AD-59447 | 91.3 | 12.9 |
| AD-59555 | 91.7 | 3.4 |
| AD-59405 | 92.5 | 5.7 |
| AD-59371 | 93.5 | 31.7 |
| AD-59443 | 93.8 | 9.0 |
| AD-59401 | 94.5 | 7.1 |
| AD-59494 | 95.1 | 9.1 |
| AD-59504 | 96.8 | 11.7 |
| AD-59369 | 96.8 | 4.8 |
| AD-59571 | 97.4 | 7.0 |
| AD-59527 | 98.6 | 7.8 |
| AD-59466 | 99.7 | 14.0 |
| AD-59526 | 102.9 | 4.6 |
| AD-59543 | 103.7 | 3.0 |
| AD-59564 | 103.7 | 12.1 |
| AD-59583 | 112.4 | 13.2 |

[0900] The two hundred thirty-two duplexes that were tested suppressed ALAS1 mRNA to varying extents in this single dose assay. According to this assay, at least four of the duplexes (AD-59453, AD-59395, AD-59477, and AD-59492) suppressed ALAS1 mRNA by 85% or more, 39 of the duplexes suppressed ALAS1 mRNA by 80% or more, 101 of the duplexes suppressed ALAS1 mRNA by 70% or more, and 152 of the duplexes suppressed ALAS1 mRNA by 50% or more. In contrast, some duplexes did not show appreciable suppression in this assay.

### Example 13

### Dose Responsive Inhibition of Porphyrin Precursors ALA and PBG Using ALAS1 siRNA

[0901] The dose response effects of an ALAS1 siRNA were investigated in a mouse model of AIP (see Example 5). This model shows ˜30% residual PBGD activity, ˜2 fold increase in basal ALA and PBG levels, ˜30-100 fold increase in ALA and PBG levels following induction by injections of Phenobarbital once per day for 3-4 days. Older animals have axonal degeneration and impaired motor function.

[0902] The ALAS1 siRNA used in this example was the AD-53558 duplex in the AF11 formulation. On day 1, the mice were administered 1 mg/kg, 0.5 mg/kg, 0.1 mg/kg, or 0.05 mg/kg of ALAS1 siRNA or LUC AD-1955 control by i.v. injection. Three phenobarbital injections were given (1 injection per day on days 2, 3, and 4) to induce hepatic ALAS1 and the porphyrin precursors, ALA and PBG. Plasma and overnight urine specimens were collected on day 5 and metabolite levels were measured by LC-MS. Baseline levels of ALA and PBG were measured prior to the first treatment on day 1. The results are shown in FIG. 16. The ALAS1 siRNA inhibited ALA and PBG levels in a dose dependent manner. The inhibitory effect on plasma ALA levels was observed at ALAS1 siRNA doses as low as 0.05 mg/kg, and the inhibitory effect on plasma PBG levels was seen at siRNA doses as low as 0.1 mg/kg.

### Example 14

### Durable Inhibition of Porphyrin Precursors ALA and PBG Using ALAS1 siRNA

[0903] The durability of the effects of an ALAS1 siRNA were investigated in a mouse model of AIP (see Example 5). The ALAS1 siRNA used in this example was the AD-53558 duplex in the AF11 formulation. The experimental design and results of this experiment are shown in FIG. 17. On day 1, mice were administered 1 mg/kg of ALAS1 siRNA or LUC AD-1955 control by i.v. injection. Three phenobarbital injections were given in week 0 (1 injection per day on days 2, 3, and 4), week 2 (1 injection per day on days 15, 16, and 17), and week 4 (1 injection per day on days 29, 30, and 31) to induce hepatic ALAS1 and porphyrin precursors ALA and PBG. Plasma and overnight urine specimens were collected on days 5, 18, and 32 and metabolite levels were measured by LC-MS. Baseline levels of ALA and PBG were measured prior to the first treatment on day 1.

[0904] As is shown in FIG. 17, the ALAS1 siRNA had a durable effect in reducing plasma ALA and PBG levels. Administration of the ALAS1 siRNA suppressed plasma ALA and PBG levels for at least 2 weeks. These results indicate that ALAS1 siRNA is an effective treatment for lowering elevated levels of ALA and PBG and thus can be used in prophylaxis, e.g., to lower chronically elevated ALA and PBG levels and to prevent recurrent porphyric attacks.

### Example 15

### ALAS1 siRNA Provides More Rapid Onset of Action Compared with Hemin Treatment

[0905] The effects of treatment with an ALAS1 siRNA were compared with the effects of hemin treatment in a mouse model of AIP (see Example 5). The ALAS1 siRNA used in this example was the AD-53558 duplex in the AF11 formulation. The experimental design and results of this experiment are shown in FIG. 18. Phenobarbital (PB) and diethyldithiocarbamate (DDC) were administered on days 1, 2, and 3. DDC is another p450 inducer that, like Phenobarbital, increases the demand for heme and helps extend the induction of ALA/PBG metabolites.

[0906] Hemin at a dose of 4 mg/kg, ALAS1 siRNA at a dose of 2 mg/kg, or control treatment was administered intravenously at 8 hours after the last administration of PB and DDC.

[0907] As is shown in FIG. 18, the onset of treatment effects was faster with ALAS1 siRNA treatment compared with hemin treatment. The rapid reduction of ALA and PBG with siRNA treatment indicates that siRNA is an effective treatment for acute attacks, because a rapid improvement in clinical symptoms is expected to accompany the reduction in ALA and PBG levels.

### Example 16

### Effects of ALAS1 siRNA GalNAc Conjugate AD-58632

[0908] AD-58632 is a 21/23mer disclosed in Example 11. AD-58632 targets the human transcript NM_000688.4 and is also cross reactive with mouse, rat, and cynomolgous monkey mRNA transcripts. AD-58632 was the only cross reactive 21/23mer identified from a screen of about 45 compounds. Further experiments with this duplex are described in this example.

[0909] Dose Dependent Effects of AD-58632 in Suppressing ALAS1 mRNA

[0910] The dose response effect of AD-58632 in suppressing ALAS1 mRNA, relative to GAPDH mRNA, was investigated in rats. Doses of 30 mg/kg, 10 mg/kg, and 3 mg/kg were tested. The levels of ALAS1 mRNA were measured in liver at 72 hours after the last dose. AD-58632, compared with PBS control, suppressed ALAS1 mRNA in a dose dependent manner (see FIG. 19). AD-58632 had a single dose ED50 of about 10 mg/kg.

[0911] Effects of AD-58632 in Rat AIP Model

[0912] The dose response effect of the AD-58632 ALAS1 GalNAc conjugate siRNA was further investigated in a rat AIP model. In this model, siRNA in an LNP is used to knock down the level of PBGD specifically in liver prior to inducing heme demaind with phenobarbitol. The rat AIP model shows transient PBGD siRNA knockdown in the liver, has ˜15% residual PBGD mRNA, and shows about a 10-50 fold increase in ALA and PBG levels upon induction by daily Phenobarbital injection for three days.

[0913] The experimental design is depicted in FIG. 20. Four groups of rats were studied. One group was treated with phenobarbital (PB) only at the indicated timepoints. A second group was treated with phenobarbital and porphobilinogen deaminase (PBGD) siRNA. A third group received phenobarbital, PBGD siRNA, and a dose of 30 mg/kg of the ALAS1 siRNA. A fourth group received phenobarbital, PBGD siRNA, and a dose of 10 mg/kg of the ALAS1 siRNA. As is shown in FIG. 20, the PBGD siRNA was administered intravenously on day 1. The ALAS1 GalNAc siRNA was administered on day 4. Phenobarbital injections were given on days 4, 5, 6, and 7. Urine was collected for a 24 hour period starting on day 7 and ending on day 8. Levels of liver PBGD mRNA, GAPDH mRNA, and ALAS-1 mRNA were assessed on day 8 using a bDNA assay. PBG and ALA levels in urine were determined using LC-MS.

[0914] The mRNA results are shown in FIG. 21. PBGD siRNA decreased PBGD mRNA level but did not decrease ALAS1 mRNA level. The ALAS1 siRNA decreased ALAS1 mRNA levels in a dose-dependent manner (see FIG. 21). The ALA and PBG results are shown in FIG. 22. ALAS1 siRNA decreased ALA and PBG levels in a dose-dependent manner (see FIG. 22).

### Example 17

### Split Dosing with AD-58632

[0915] The efficacy of the ALAS1 siRNA GalNAc conjugate AD-58632 was investigated in two separate split dosing paradigms. For each of these studies, female Sprague Dawley rats were used. The rats were housed in SCLR (a light cycle room that is 12 hours light on and 12 hours light off) and were sacrificed at 72 hours following the last injection. ALAS1 and GAPDH mRNA levels in the liver were measured using branched DNA (bDNA) assay.

[0916] Five Daily Doses Versus One Bolus Dose Paradigm

[0917] In the first paradigm, groups of rats were given either five doses of siRNA (one dose each day) or a single bolus dose that had the same total concentration as the sum of the five individual doses. Specifically, rats were assigned to one of the following treatment conditions: (1) subcutaneous injection of 6 mg/kg siRNA once per day for five days (2) subcutaneous injection of 2 mg/kg siRNA once per day for five days, (3) subcutaneous injection of 1 mg/kg siRNA once per day for five days, (4) subcutaneous injection of a single bolus dose of 30 mg/kg siRNA (5) subcutaneous injection of a single bolus dose of 10 mg/kg siRNA, (6) subcutaneous injection of a single bolus dose of 5 mg/kg siRNA, or (7) PBS control treatment.

[0918] The results are shown in FIG. 23. In this paradigm, a single bolus dose of siRNA provided greater suppression of ALAS1 mRNA than did repeated dosing of the same concentration of siRNA over the course of five days. This was true for all doses studied.

[0919] Once Per Week Dosing for Four Weeks

[0920] In the second paradigm, rats were given subcutaneous injections of siRNA at one of three doses (10 mg/kg, 5 mg/kg, or 2.5 mg/kg) once per week for four weeks. A control group received PBS injections.

[0921] The results are shown in FIG. 24. Compared with single dosing, providing four weekly doses at 10 mg/kg improved the maximal knockdown achieved (ED50 is 10 mg/kg at single dose). In contrast, multiple dosing at 5 and 2.5 mg/kg per week did not improve silencing in this paradigm.

### Example 18

### Identification and Testing of ALAS1 siRNAs with Shorter Sense and Antisense Strands

[0922] Further experiments were conducted to explore the effects of shortening the siRNA duplexes to 19-19mers. Five more new cross-reactive 19-19mer duplexes that bind to human (h) (NM_000688.4), rhesus monkey (rh) (XM_001090440.2), mouse (m) (NM_020559.2), and rat (r) (NM_024484.2) ALAS1 mRNA transcripts were identified. None of these duplexes showed results as good as the 21/23 mer AD-58632 (see FIG. 25).

[0923] The effects of modifying the length and overhangs on the best two 19-19mers (AD-59115 and AD-59125) were investigated (FIGS. 26 and 27). The modified sequences are shown in Table 21.

TABLE 21
Sequences for length/overhang evaluation of best two 19-19mers

| | | Target | | | | | |
|---|---|---|---|---|---|---|---|
| | | sites of | | | | | |
| | SEQ | anti- | | | | | |
| | ID | sense | | | | | |
| | NO: | sequence | | | | | |
| SEQ ID NO: | (anti- | on | Cross | Over- | Duplex | | Antisense (AS) |
| (sense) | sense) | NM_000688.4 | reactivity | hang | Name | Sense Sequence (5′-3′) | Sequence (5′-3′) |
| 4172 | 4173 | 877-895 | h/rh/m/r | 19/19 | AD- | AfsasGfaGfuGfuCfUfC | asAfsgAfaGfaUfgAfgacAfc |
| | | | | | 59115 | faUfcUfuCfuUfL96 | Ufcsusu |
| 4174 | 4175 | 875-895 | h/rh/m/r | 19/21 | AD- | AfsasGfaGfuGfuCfUfC | asAfsgAfaGfaUfgAfgacAfc |
| | | | | | 60090 | faUfcUfuCfuUfL96 | UfcUfususc |
| 4176 | 4177 | 877-895 | NC OH* | 19/21 | AD- | AfsasGfaGfuGfuCfUfC | asAfsgAfaGfaUfgAfgacAfc |
| | | | | | 60091 | faUfcUfuCfuUfL96 | UfcUfusasa |
| 4178 | 4179 | 873-895 | h/rh/m/r | 21/23 | AD- | GfsasAfaGfaGfuGfUfC | asAfsgAfaGfaUfgAfgacAfcU |
| | | | | | 58632 | fuCfaUfcUfuCfuUfL96 | fcUfuUfcsusg |
| 4180 | 4181 | 875-895 | NC OH* | 21/23 | AD- | GfsasAfaGfaGfuGfUfC | asAfsgAfaGfaUfgAfgacAfcU |
| | | | | | 60092 | fuCfaUfcUfuCfuUfL96 | fcUfuUfcsasa |
| 4182 | 4183 | 875-893 | h/rh/m/r | 19/19 | AD- | GfsasAfaGfaGfuGfUfC | usAfsaGfaUfgAfgAfcacUfcU |
| | | | | | 59129 | fuCfaUfcUfuAfL96 | fususc |
| 4184 | 4185 | 873-893 | h/rh/m/r | 19/21 | AD- | GfsasAfaGfaGfuGfUfC | usAfsaGfaUfgAfgAfcacUfcU |
| | | | | | 60093 | fuCfaUfcUfuAfL96 | fuUfcsusg |
| 4186 | 4187 | 875-893 | NC OH* | 19/21 | AD- | GfsasAfaGfaGfuGfUfC | usAfsaGfaUfgAfgAfcacUfcU |
| | | | | | 60094 | fuCfaUfcUfuAfL96 | fuUfcsasa |
| 4188 | 4189 | 871-893 | h/rh | 21/23 | AD- | CfsasGfaAfaGfaGfuGfUfC | usAfsaGfaUfgAfgAfcacUfcU |
| | | | | | 60095 | fuCfaUfcUfuAfL96 | fuUfcUfgsgsu |
| 4190 | 4191 | 871-893 | m/r | 21/23 | AD- | CfsasGfaAfaGfaGfuGfUfC | usAfsaGfaUfgAfgAfcacUfcUfu |
| | | | | | 60096 | fuCfaUfcUfuAfL96 | UfcUfgsgsc |

*Non-complementary overhang

Overhangs improved potency. They also provided a further derivative sequence (AD-60489, which was based on AD-60095) for further structure activity relationship (SAR) studies (1 mismatch at pos23 to rodent).

### Example 19

### Effects of ALAS1 siRNA GalNAc Conjugates AD-60489 and AD-58632

[0924] The effects of a further GalNAc conjugate ALAS1 siRNA duplex AD-60489 were investigated and compared with the effects of AD-58632. The sequences of these duplexes are shown in Table 22A. AD-60489 has a single mismatch to rodent ALAS1 mRNA at the 3′ end of the antisense sequence. Thus, whereas AD-58632 is fully complementary with human, cynomolgous monkey, mouse, and rat sequences, AD-60489 is fully complementary only with human and cynomolgous monkey sequences.

TABLE 22A
Sequences of ALAS1 siRNA Duplexes AD-58632 and AD-60489

| | SEQ | Target | | | |
|---|---|---|---|---|---|
| | ID | sites of | | | |
| SEQ | NO: | antisense | | | |
| ID NO: | (anti- | sequence on | Duplex | | |
| (sense) | sense) | NM_000688.4 | Name | Sense Sequence (5′-3′) | Antisense Sequence (5′-3′) |
| 4149 | 4150 | 873-895 | AD- | GfsasAfaGfaGfuGfUfCfuCfaUfcUfuCfuUf | asAfsgAfaGfaUfgAfgacAfcUfcUfuUfcs |
| | | | 58632 | L96 | usg |
| 4151 | 4152 | 871-893 | AD- | CfsasGfaAfaGfaGfUfGfuCfuCfaUfcUfuAf | usAfsaGfaUfgAfgAfcacUfcUfuUfcUfgs |
| | | | 60489 | L96 | gsu |

[0925] The suppression of ALAS1 mRNA is shown in FIG. 28. Compared with AD-58632, AD-60489 provided more effective suppression at 3 mg/kg and 10 mg/kg and exhibited about a two fold improvement in ED50. The single dose ED50 of AD-60489 was about 5 mg/kg.

### Example 20

### Effects of ALAS1 siRNA GalNAc Conjugates AD-60489 and AD-58632 in Non-Human Primate Studies

[0926] The effectiveness of AD-58632 and AD-60489 in suppressing liver mRNA was investigated in non-human primates. The experimental design is shown in FIG. 29. Doses of siRNA (5 mg/kg, 2.5 mg/kg, or 1.25 mg/kg) or PBS control in a volume of 2 mL/kg were administered subcutaneously every day for 5 days, then every 2 days for 3 weeks. ALAS1 mRNA silencing was evaluated in liver tissue obtained from a liver biopsy taken on day 15. The biopsy was taken after a serum draw and prior to the administration of dose 10 (see FIG. 29). Serum samples for the circulating extracellular RNA detection (cERD) method (see Example 21) were collected on days −10, −3, 7, 15, 23, 31, and 43. Serum was collected for a clinical chemistry panel on days −3, 6, 30, and 43. The clinical chemistry panel included assessment of the levels of alanine aminotransferase (ALT), aspartate aminotransferase (AST), and alkaline phosphatase (ALP).

[0927] AD-58632 and AD-60489 suppressed ALAS1 mRNA in liver in a dose-dependent manner (see FIG. 30). AD-60489 showed greater efficacy than did AD-58632. For example, at the lowest dose studied (1.25 mg/kg), AD-60489 suppressed the relative ALAS1 message to about 42% of the control level, whereas AD-58632 showed little suppression at this dose. At 2.5 mg/kg, AD-60489 suppressed the relative ALAS1 message to about 26% of the control level, whereas AD-58632 suppressed the relative ALAS1 message to about 64% of the control level. At 5 mg/kg, AD-60489 suppresed the relative ALAS1 message to about 21% of the control level, and AD-58632 suppressed the relative ALAS1 message to about 55% of the control level.

[0928] Clinical chemistry results indicated that the sustained knockdown of ALAS1 using the ALAS1 siRNAs was safe and well tolerated. No elevations in ALT, AST, or ALP were observed.

### Example 21

### Effects of ALAS1 siRNA GalNAc Conjugates AD-60489 and AD-58632 in Non-Human Primate Studies as Assessed Using the cERD Assay

[0929] The effects of ALAS1 siRNA GalNAc conjugates AD-60489 and AD-58632 were assessed in non-numan primates using the circulating extracellular RNA detection (cERD) method. This method is described, e.g., in Sehgal, A. et al. Quantitation of tissue-specific target gene modulation using circulating RNA (Poster presented on Feb. 9, 2012 at the Keystone Gene Silencing by small RNAs symposium (Vancouver, Feb. 7-12, 2012) and in Sehgal, A. et al. Tissue-specific gene silencing monitored in circulating RNA, RNA, 20: 1-7, published online Dec. 19, 2013. As is shown in FIG. 29, serum samples for the circulating extracellular RNA detection (cERD) method were collected on days −10, −3, 7, 15, 23, 31, and 43.

[0930] For the cERD assay, serum samples were thawed on ice. 375-400 μL of 8M LiCl was added to 3-3.5 mL of serum in ultracentrifuge (UC) tubes, and incubated at a temperature of 4° C. for at least 1 hour. PBS was added to the top of each UC tube, leaving about 1 cm of dry space at the top of the tube to prevent walls of tubes from collapsing during spin. The tubes were dried to remove any condensation from being incubated on ice. Samples were loaded into an MC 55 Rotor under a hood, and the samples were spun at 150,000-200,000 g for 100-120 minutes. The supernatant was discarded from the pellet. 1 mL Trizol was added to the pellet in the UC tube, the tube was vortexed, and the contents were transferred to a 1.5 mL microcentrifuge tube. To each tube, 200 μL of chloroform was added, and the tube was inverted several times to mix. One sample was prepared at a time. The samples were spun at 13,000 RPM for 10-20 minutes at 4° C. The upper aqueous phase was transferred to a fresh 1.5 mL tube (˜500 μL volume). An equal volume of 100% isopropanol, 1 μL of linear acrylamind (4°), and 1/10^{th} volume of 3M NaoAc pH 5.5 or less was added to each sample (typically 500 μL of isopropanol and 50 μL NaoAc). The sample was spun at 13,000 RPM for 10 min at 4° C. Supernatants were reserved. The pellet was washed twice with ice cold 70% EtOH (500 μL each wash) and spun at 13,000 RPM for ˜5 min. at 4° C. after each wash. The pellet was allowed to air dry for ˜5 minutes and then resuspended in 20 μL NF H2O. 10 μL was used in cDNA reaction. The resuspended RNA was stored at −80° C.

### Results

[0931] The serum mRNA knockdown as assessed using the cERD assay correlated with the results obtained from the liver biopsy. See FIG. 31. This is a surprising result, because ALAS1 is not a serum protein. The cERD assay provided herein allows monitoring of circulating ALAS1 mRNA. This has the advantage, for example, that the levels of ALAS1 mRNA can be measured over time without doing serial liver biopsies, which would be technically difficult and expensive.

[0932] The kinetics of mRNA knockdown were determined using the cERD assay results. See FIG. 32. AD-60489 achieved greater than 50% knockdown, even at a dose of only 1.25 mg/kg.

### Example 22

### Safety Studies of ALAS1 siRNAs

[0933] The following safety studies indicate that sustained knockdown of ALAS1 is safe and well tolerated.

[0934] Non-Human Primate Studies

[0935] As described above (see Example 20), in non-human primate studies, no ALT, AST, or ALP elevations were observed after administration of AD-60489 and AD-58632.

[0936] Rat Studies

[0937] In rats, a four week study was carried out with AD-58632. The siRNA was administered every day for 5 days at 10 mg/kg in the first week, then every other day at 10 mg/kg for weeks 2-4 of the study. The total exposure was 140 mg. No adverse clinical signs or body weight changes were observed. No test article related changes in hematology or coagulation parameters were observed. Furthermore, no adverse histopathology was observed. There was minimal vacuolation in spleen and minimal subcapsular fibrosis in kidney.

[0938] Mouse Studies

[0939] In mice, P450 mRNAs were assessed after ALAS1 knockdown. Minor dose dependent increases in Cyp2b10 were observed at 48 hours after administration of an ALAS1 LNP formulation. This resolved by 168 hours.

### Example 23

### Identification of Further Effective ALAS1 siRNAs Using Structure Activity Relationship Studies

[0940] Structure activity relationship (SAR) studies, including studies described in other examples herein, were carried out to identify further effective ALAS1 siRNAs derived from those that have already been identified, e.g., AD-58632 and AD-60489. Effects of chemical modifications were investigated. Chemical modifications include 1) 2′-O-methyl versus 2′-fluoro modifications, 2) Decrease in 2′Uf (2′fluoro modifications), 3) Add PS (phosphorothioate), 4) Use internal dTs, and/or 5) glycol nucleic acids (GNAs). Without wishing to be bound by theory, modifications can enhance potency, e.g., through 1) better unwinding or enhanced RISC loading, or 2) better catalytic target engagement. Modifications can also enhance stability so that compounds can accumulate and perform better when multiple doses are administered.

[0941] Improved activity relative to other duplexes (e.g., AD-58632 and/or AD-60489) was observed in some instances (see Table 22B), whereas similar activity (see Table 23) or reduced activity (Table 24) was observed in other instances. These instances are merely presented as examples based on the screening of more than 150 siRNAs. Further exemplification of SAR studies is provided herein.

TABLE 22B
Improved Activity Relative to Parent

| Duplex* | IC50 | Sense (5′ to 3′) | Antisense (5′ to 3′) |
|---|---|---|---|
| AD- | 0.017 | GfsasAfaGfaGfuGfUfCfuCfaUfcUfuCfuUfL96 (SEQ ID | asAfsgAfaGfaUfgAfgacAfcUfcUfuUfcsusg (SEQ |
| 58632.10 | | NO: 4192) | ID NO: 4193) |
| (parent) | | | |
| AD- | 0.004 | GfsasAfaGfAfGfuGfdTcucaucuucuuL96 (SEQ ID NO: | asAfsgAfaGfaugAfgAfcAfcucuuucsusg (SEQ ID |
| 80643.1 | | 4194) | NO: 4195) |
| AD- | 0.010 | CfsasGfaAfaGfaGfUfGfuCfuCfaUfcUfuAfL96 (SEQ ID | usAfsaGfaUfgAfgAfcacUfcUfuUfcUfgsgsu |
| 60489.3 | | NO: 4196) | (SEQ ID NO: 4197) |
| (parent) | | | |
| AD- | 0.001 | CfsasGfaAfaGfaGfdTGfuCfuCf(Agn)UfscUfsuAfsL96 | usAfsaGfaUfgAfgAfcacUfcdTuUfcUfgsgsu |
| 60879.1 | | (SEQ ID NO: 4198) | (SEQ ID NO: 4199) |

*The number following the decimal point in a duplex name in this and other tables merely refers to a batch production number.

TABLE 23
Similar Activity Relative to Parent but Increased Stability

| Duplex | IC50 | Sense (5′ to 3′) | Antisense (5′ to 3′) |
|---|---|---|---|
| AD- | 0.017 | GfsasAfaGfaGfuGfUfCfuCfaUfcUfuCfuUfL96 | asAfsgAfaGfaUfgAfgacAfcUfcUfuUfcsusg (SEQ |
| 58632.10 | | (SEQ ID NO: 4200) | ID NO: 4201) |
| (parent) | | | |
| AD- | 0.014 | gsasaagaGfuGfuCfucaucuucuuL96 (SEQ ID | asAfsgAfaGfaugAfgacAfcucuuucsusg (SEQ ID |
| 60839.1 | | NO: 4202) | NO: 4203) |

TABLE 24
Reduced Activity Relative to Parent

| Duplex | IC50 | Sense (5′ to 3′) | Antisense (5′ to 3′) |
|---|---|---|---|
| AD- | 0.017 | GfsasAfaGfaGfuGfUfCfuCfaUfcUfuCfuUfL96 | asAfsgAfaGfaUfgAfgacAfcUfcUfuUfcsusg (SEQ |
| 58632.10 | | (SEQ ID NO: 4204) | ID NO: 4205) |
| (parent) | | | |
| AD- | 0.801 | GfsasAfaGfAfGfuGfdTcucaucuucuuL96 | asAfsgAf(Agn)GfaUfgAfgacAfcUfcUfuUfcsusg |
| 60886.1 | | (SEQ ID NO: 4206) | (SEQ ID NO: 4207) |

### Example 24

### In Vitro Structure Activity Relationship Studies of AD-58632

[0942] AD-58632 and siRNA derivatives of AD-58632 were generated, and some siRNAs were screened in vitro for activity. Abbreviations for chemical modifications are provided in Table 1.

In Vitro Activity at 10 nM and 0.1 nM siRNA

[0943] The in vitro activity of the siRNAs in suppressing ALAS1 mRNA was tested in in Hep3B cells that were transfected using Lipofectamine2000 as a transfection reagent. Experiments were performed at the indicated siRNA concentrations (e.g., 0.1 nM, 10 nM) and analyzed by branched DNA (bDNA) assay at 24 hours post-transfection. The results are expressed as percent remaining mRNA relative to the siRNA AD-1955, a non-targeting siRNA that was used as a negative control.

[0944] Sequences of siRNAs and results of in vitro testing are provided in Table 25, Table 26, and Table 27.

TABLE 25
Sequences and in vitro screen results for AD-58632 and AD-58632 derivative siRNAs

| | | Target | | | | | | | |
|---|---|---|---|---|---|---|---|---|---|
| | | sites of | | | | | | | |
| | SEQ | antisense | | | | | | | |
| SEQ ID | ID NO: | seq | | | | | | | |
| NO: | (anti- | on | | | | Avg | SD | Avg | SD |
| (sense) | sense) | NM_000688.4 | Duplex | Sense Sequence (5′-3′) | Antisense (AS) Sequence (5′-3′) | 10 nM | 10 nM | 0.1 nM | 0.1 nM |
| 4208 | 4209 | 873-895 | AD-58632.8 | GfsasAfaGfaGfuGfUfCfuCfaUfcUfuCfuUfL96 | asAfsgAfaGfaUfgAfgacAfcUfcUfuUfcsusg | 11.79 | 2.70 | 46.65 | 4.21 |
| 4210 | 4211 | 873-895 | AD-60405.1 | GfsasAfaGfaGfuGfuCfuCfaucuuCfuuL96 | asAfsgAfaGfaUfgAfgacAfcUfcUfuUfcsusg | 15.61 | 4.49 | 63.49 | 10.51 |
| 4212 | 4213 | 873-895 | AD-60411.1 | GfsasAfaGfaGfuGfuCfuCfaucuucuuL96 | asAfsGfAfaGfaUfgAfgAfcAfcUfcUfuUfcsusg | 15.04 | 6.13 | 62.59 | 10.05 |
| 4214 | 4215 | 873-895 | AD-60417.1 | GfsasaagaGfuGfuCfuCfaucuucuuL96 | asAfsGfAfaGfaUfgAfgAfcAfcUfcUfuUfcsusg | 13.96 | 5.47 | 66.10 | 8.21 |
| 4216 | 4217 | 873-895 | AD-60423.1 | gsasaagaGfuGfuCfuCfaucuucuuL96 | asAfsGfAfaGfaUfgAfgAfcAfcUfcUfuUfcsusg | 12.59 | 3.03 | 41.47 | 3.77 |
| 4218 | 4219 | 873-895 | AD-60423.2 | gsasaagaGfuGfuCfuCfaucuucuuL96 | asAfsGfAfaGfaUfgAfgAfcAfcUfcUfuUfcsusg | 13.79 | 3.38 | 55.93 | 7.90 |
| 4220 | 4221 | 873-895 | AD-60434.1 | gsasaagaGfuGfuCfucaucuucuuL96 | asAfsGfAfaGfaUfgAfgAfcAfcUfcUfuUfcsusg | 14.74 | 2.76 | 48.68 | 6.64 |
| 4222 | 4223 | 873-895 | AD-60440.1 | gsasaagaGfuGfucucaucuucuuL96 | asAfsGfAfaGfaUfgAfgAfcAfcUfcUfuUfcsusg | 28.31 | 8.68 | 77.01 | 3.99 |
| 4224 | 4225 | 873-895 | AD-60400.1 | gsasaagaguGfucucaucuucuuL96 | asAfsGfAfaGfaUfgAfgAfcAfcUfcUfuUfcsusg | 39.90 | 5.67 | 99.64 | 8.58 |
| 4226 | 4227 | 873-895 | AD-60406.1 | gsasaagagugucucaucuucuuL96 | asAfsGfAfaGfaUfgAfgAfcAfcUfcUfuUfcsusg | 56.06 | 2.08 | 95.83 | 17.01 |
| 4228 | 4229 | 873-895 | AD-60412.1 | GfsasaagaGfuGfucucaucuucuuL96 | asAfsGfAfaGfaUfgAfgAfcAfcUfcUfuUfcsusg | 43.09 | 2.23 | 87.52 | 8.10 |
| 4230 | 4231 | 873-895 | AD-60418.1 | gsasaagaGfuGfucucaucuucuuL96 | asAfsGfAfaGfaUfgAfgAfcAfcucUfuUfcsusg | 65.84 | 7.75 | 108.07 | 21.88 |
| 4232 | 4233 | 873-895 | AD-60424.1 | gsasaagaGfuGfucucaucuucuuL96 | asAfsGfAfaGfaUfgAfgAfcAfcucuuUfcsusg | 45.51 | 11.82 | 84.40 | 10.69 |
| 4234 | 4235 | 873-895 | AD-60429.1 | gsasaagaGfuGfucucaucuucuuL96 | asAfsGfAfaGfaUfgAfgAfcAfcucuuucsusg | 63.96 | 13.25 | 81.21 | 1.96 |
| 4236 | 4237 | 873-895 | AD-60435.1 | gsasaagaGfuGfucucaucuucuuL96 | asAfsGfAfaGfaugAfgAfcAfcucuuucsusg | 80.12 | 10.02 | 95.33 | 23.09 |
| 4238 | 4239 | 873-895 | AD-60441.1 | gsasaaGfaGfuGfucucaucuucuuL96 | asAfsGfAfaGfaugAfgAfcAfcucuuucsusg | 63.29 | 17.48 | 97.07 | 8.04 |
| 4240 | 4241 | 873-895 | AD-60401.1 | gsasaaGfAfGfuGfucucaucuucuuL96 | asAfsGfAfaGfaugAfgAfcAfcucuuucsusg | 55.27 | 10.26 | 109.06 | 4.23 |
| 4242 | 4243 | 873-895 | AD-60407.1 | GfsasaaGfAfGfuGfucucaucuucuuL96 | asAfsGfAfaGfaugAfgAfcAfcucuuucsusg | 47.39 | 1.88 | 98.04 | 22.58 |
| 4244 | 4245 | 873-895 | AD-60413.1 | GfsasAfaGfAfGfuGfucucaucuucuuL96 | asAfsGfAfaGfaugAfgAfcAfcucuuucsusg | 55.60 | 11.65 | 92.88 | 5.65 |
| 4246 | 4247 | 873-895 | AD-60419.1 | GfsasAfaGfAfGfuGfdTcucaucuucuuL96 | asAfsGfAfaGfaugAfgAfcAfcucuuucsusg | 20.82 | 15.07 | 57.82 | 8.31 |
| 4248 | 4249 | 873-895 | AD-60425.1 | GfsasAfaGfAfGfuGfudCucaucuucuuL96 | asAfsGfAfaGfaugAfgAfcAfcucuuucsusg | 35.58 | 13.30 | 73.46 | 10.91 |
| 4250 | 4251 | 873-895 | AD-60430.1 | GfsasAfaGfAfGfuGfucdTcaucuucuuL96 | asAfsGfAfaGfaugAfgAfcAfcucuuucsusg | 40.54 | 1.41 | 81.87 | 11.23 |
| 4252 | 4253 | 873-895 | AD-60436.1 | GfsasAfaGfAfGfuGfucudCaucuucuuL96 | asAfsGfAfaGfaugAfgAfcAfcucuuucsusg | 60.12 | 11.74 | 81.51 | 7.41 |
| 4254 | 4255 | 873-895 | AD-60442.1 | GfsasAfaGfAfGfuGfucucdAucuucuuL96 | asAfsGfAfaGfaugAfgAfcAfcucuuucsusg | 40.82 | 12.61 | 83.06 | 1.05 |
| 4256 | 4257 | 873-895 | AD-60402.1 | GfsasAfaGfAfGfuGfucucadTcuucuuL96 | asAfsGfAfaGfaugAfgAfcAfcucuuucsusg | 62.16 | 11.24 | 123.60 | 6.71 |
| 4258 | 4259 | 873-895 | AD-60408.1 | GfsasAfaGfAfGfuGfucucaudCuucuuL96 | asAfsGfAfaGfaugAfgAfcAfcucuuucsusg | 45.39 | 15.50 | 86.69 | 6.12 |
| 4260 | 4261 | 873-895 | AD-60414.1 | GfsasAfaGfAfGfuGfucucaucudTcuuL96 | asAfsGfAfaGfaugAfgAfcAfcucuuucsusg | 32.56 | 3.52 | 84.21 | 0.24 |
| 4262 | 4263 | 873-895 | AD-60420.1 | GfsasAfaGfAfGfuGfucucaucuudCuuL96 | asAfsGfAfaGfaugAfgAfcAfcucuuucsusg | 52.57 | 10.77 | 94.45 | 3.43 |
| 4264 | 4265 | 873-895 | AD-60426.1 | GfsasAfaGfAfGfuGfucucaucuucudTL96 | asAfsGfAfaGfaugAfgAfcAfcucuuucsusg | 52.49 | 1.91 | 91.15 | 14.49 |
| 4266 | 4267 | 873-895 | AD-60431.1 | gsasaaGfaGfuGfudCudCaucuucuuL96 | asAfsGfAfaGfaugAfgAfcAfcucuuucsusg | 26.66 | 1.16 | 73.09 | 6.83 |
| 4268 | 4269 | 873-895 | AD-60437.1 | gsasaaGfaGfuGfudCucadTcuucuuL96 | asAfsGfAfaGfaugAfgAfcAfcucuuucsusg | 32.80 | 4.58 | 69.03 | 3.02 |
| 4270 | 4271 | 873-895 | AD-60443.1 | gsasaaGfaGfuGfudCucaucdTucuuL96 | asAfsGfAfaGfaugAfgAfcAfcucuuucsusg | 35.10 | 7.10 | 69.92 | 17.93 |
| 4272 | 4273 | 873-895 | AD-60403.1 | gsasaaGfaGfuGfudCudCaucdTucuuL96 | asAfsGfAfaGfaugAfgAfcAfcucuuucsusg | 25.28 | 1.68 | 105.23 | 23.99 |
| 4274 | 4275 | 873-895 | AD-60409.1 | gsasaaGfaGfuGfudCudCadTcdTucuuL96 | asAfsGfAfaGfaugAfgAfcAfcucuuucsusg | 30.48 | 1.88 | 72.34 | 3.34 |
| 4276 | 4277 | 873-895 | AD-60415.1 | gsasaaGfaGfuGfudCudCadTcdTudCuuL96 | asAfsGfAfaGfaugAfgAfcAfcucuuucsusg | 25.28 | 7.10 | 69.53 | 10.72 |
| 4278 | 4279 | 873-895 | AD-60421.1 | gsasaaGfaGfuGfucucaucuucuuL96 | asAfsGfAfaGfadTgAfgAfcAfcucuuucsusg | 59.28 | 5.83 | 66.88 | 0.63 |
| 4280 | 4281 | 873-895 | AD-60427.1 | gsasaaGfaGfuGfucucaucuucuuL96 | asAfsGfAfaGfaugAfgAfcAfcdTcuuucsusg | 34.80 | 8.13 | 79.65 | 11.25 |
| 4282 | 4283 | 873-895 | AD-60432.1 | gsasaaGfaGfuGfucucaucuucuuL96 | asAfsGfAfaGfaugAfgAfcAfcucdTuucsusg | 46.78 | 6.42 | 79.19 | 16.72 |
| 4284 | 4285 | 873-895 | AD-60438.1 | gsasaaGfaGfuGfucucaucuucuuL96 | asAfsGfAfaGfadTgAfgAfcAfcdTcuuucsusg | 32.07 | 9.46 | 57.87 | 10.18 |
| 4286 | 4287 | 873-895 | AD-60444.1 | gsasaaGfaGfuGfucucaucuucuuL96 | asAfsGfAfaGfadTgAfgAfcAfcucdTuucsusg | 55.55 | 10.17 | 89.52 | 3.91 |
| 4288 | 4289 | 873-895 | AD-60404.1 | gsasaaGfaGfuGfucucaucuucuuL96 | asAfsGfAfaGfa(Tgn)gAfgAfcAfcucuuucsusg | 50.06 | 9.17 | 93.46 | 2.56 |
| 4290 | 4291 | 873-895 | AD-60410.1 | gsasaaGfaGfuGfucucaucuucuuL96 | asAfsGfAfaGfaugAfgAfcAfc(Tgn)cuuucsusg | 44.40 | 13.93 | 88.96 | 6.06 |
| 4292 | 4293 | 873-895 | AD-60416.1 | gsasaaGfaGfuGfucucaucuucuuL96 | asAfsGfAfaGfaugAfgAfcAfcuc(Tgn)uucsusg | 28.56 | 7.82 | 76.36 | 19.47 |
| 4294 | 4295 | 873-895 | AD-60422.1 | GfsasAfaGfAfGfuGf(Tgn)cucaucuucuuL96 | asAfsGfAfaGfaugAfgAfcAfcucuuucsusg | 40.37 | 10.86 | 84.06 | 12.08 |
| 4296 | 4297 | 873-895 | AD-60428.1 | GfsasAfaGfAfGfuGfuc(Tgn)caucuucuuL96 | asAfsGfAfaGfaugAfgAfcAfcucuuucsusg | 56.81 | 22.64 | 92.15 | 0.26 |
| 4298 | 4299 | 873-895 | AD-60433.1 | GfsasAfaGfAfGfuGfucuc(Agn)ucuucuuL96 | asAfsGfAfaGfaugAfgAfcAfcucuuucsusg | 36.78 | 5.31 | 67.92 | 12.55 |
| 4300 | 4301 | 873-895 | AD-60439.1 | GfsasAfaGfAfGfuGfucuca(Tgn)cuucuuL96 | asAfsGfAfaGfaugAfgAfcAfcucuuucsusg | 32.81 | 6.72 | 77.93 | 13.33 |
| 4302 | 4303 | 873-895 | AD-60445.1 | GfsasAfaGfAfGfuGfucucauc(Tgn)ucuuL96 | asAfsGfAfaGfaugAfgAfcAfcucuuucsusg | 13.25 | 3.28 | 78.08 | 4.05 |
| 4304 | 4305 | 873-895 | AD-60451.1 | GfsasAfaGfAfGfuGfucucaucu(Tgn)cuuL96 | asAfsGfAfaGfaugAfgAfcAfcucuuucsusg | 34.74 | 11.06 | 88.93 | 5.19 |
| 4306 | 4307 | 873-895 | AD-60457.1 | GfsasAfaGfAfGfuGfucucaucuuc(Tgn)uL96 | asAfsGfAfaGfaugAfgAfcAfcucuuucsusg | 41.26 | 6.16 | 92.15 | 0.64 |
| 4308 | 4309 | 873-895 | AD-60463.1 | GfsasAfaGfaGfuGfUfCfuCfaUfcUfuCfuAfL96 | usAfsgAfaGfaUfgAfgacAfcUfcUfuUfcsusg | 19.58 | 7.98 | 69.67 | 4.64 |
| 4310 | 4311 | 873-895 | AD-60469.1 | CfsasAfaGfaGfuGfUfCfuCfaUfcUfuCfuUfL96 | asAfsgAfaGfaUfgAfgacAfcUfcUfuUfgsasc | 19.35 | 9.30 | 72.30 | 0.50 |
| 4312 | 4313 | 873-895 | AD-60474.1 | CfsusAfaGfaGfuGfUfCfuCfaUfcUfuCfuUfL96 | asAfsgAfaGfaUfgAfgacAfcUfcUfuAfgsasc | 21.60 | 4.27 | 76.35 | 11.71 |
| 4314 | 4315 | 873-895 | AD-60479.1 | CfsusUfaGfaGfuGfUfCfuCfaUfcUfuCfuUfL96 | asAfsgAfaGfaUfgAfgacAfcUfcUfaAfgsasc | 28.01 | 4.45 | 76.55 | 27.32 |
| 4316 | 4317 | 873-895 | AD-60484.1 | CfsusUfaGfaGfuGfUfCfuCfaUfcUfuCfuUfL96 | asAfsgAfaGfaUfgAfgacAfcUfcUfaAfgsusg | 20.31 | 3.08 | 71.99 | 9.53 |
| 4318 | 4319 | 873-895 | AD-60446.1 | GfsusUfuGfaGfuGfUfCfuCfaUfcUfuCfuUfL96 | asAfsgAfaGfaUfgAfgacAfcUfcAfaAfcsusg | 18.65 | 5.11 | 73.52 | 17.87 |
| 4320 | 4321 | 873-895 | AD-60452.1 | GfsasUfuCfaGfuGfUfCfuCfaUfcUfuCfuUfL96 | asAfsgAfaGfaUfgAfgacAfcUfgAfaUfcsusg | 28.72 | 1.21 | 83.09 | 15.75 |
| 4322 | 4323 | 873-895 | AD-60458.1 | GfsasAfuCfuGfuGfUfCfuCfaUfcUfuCfuUfL96 | asAfsgAfaGfaUfgAfgacAfcAfgAfuUfcsusg | 50.15 | 13.02 | 114.93 | 11.58 |
| 4324 | 4325 | 873-895 | AD-60464.1 | GfsasAfaGfaGfuGfUfCfuCfaUfcUfuCfuUfL96 | (Agn)AfsgAfaGfaUfgAfgacAfcUfcUfuUfcsusg | 35.71 | 5.07 | 103.88 | 3.01 |
| 4326 | 4327 | 873-895 | AD-60470.1 | GfsasAfaGfaGfuGfUfCfuCfaUfcUfuCfuUfL96 | asAfs(Ggn)AfaGfaUfgAfgacAfcUfcUfuUfcsusg | 17.59 | 0.78 | 73.15 | 11.75 |
| 4328 | 4329 | 873-895 | AD-60475.1 | GfsasAfaGfaGfuGfUfCfuCfaUfcUfuCfuUfL96 | asAfsg(Agn)aGfaUfgAfgacAfcUfcUfuUfcsusg | 22.07 | 4.57 | 68.64 | 25.12 |
| 4330 | 4331 | 873-895 | AD-60480.1 | GfsasAfaGfaGfuGfUfCfuCfaUfcUfuCfuUfL96 | asAfsgAf(Agn)GfaUfgAfgacAfcUfcUfuUfcsusg | 15.54 | 1.22 | 66.39 | 14.34 |
| 4332 | 4333 | 873-895 | n/a | GfsasAfaGfaGfuGfUfCfuCfaUfcUfuCfuUfL96 | asAfsgAfa(Ggn)aUfgAfgacAfcUfcUfuUfcsusg | | | | |
| 4334 | 4335 | 873-895 | AD-60447.1 | GfsasAfaGfaGfuGfUfCfuCfaUfcUfuCfuUfL96 | asAfsgAfaGf(Agn)UfgAfgacAfcUfcUfuUfcsusg | 31.33 | 4.75 | 104.36 | 7.71 |
| 4336 | 4337 | 873-895 | AD-60453.1 | GfsasAfaGfaGfuGfUfCfuCfaUfcUfuCfuUfL96 | asAfsgAfaGfa(Tgn)gAfgacAfcUfcUfuUfcsusg | 15.42 | 0.90 | 76.29 | 0.41 |
| 4338 | 4339 | 873-895 | AD-60459.1 | GfsasAfaGfaGfuGfUfCfuCfaUfcUfuCfuUfL96 | asAfsgAfaGfaUf(Ggn)AfgacAfcUfcUfuUfcsusg | 27.70 | 10.91 | 89.20 | 3.46 |
| 4340 | 4341 | 873-895 | AD-60465.1 | GfsasAfaGfaGfuGfUfCfuCfaUfcUfuCfuUfL96 | asAfsgAfaGfaUfg(Agn)gacAfcUfcUfuUfcsusg | 28.44 | 6.84 | 87.28 | 5.73 |
| 4342 | 4343 | 873-895 | AD-60471.1 | GfsasAfaGfaGfuGfUfCfuCfaUfcUfuCfuUfL96 | asAfsgAfaGfaUfgAf(Ggn)acAfcUfcUfuUfcsusg | 24.03 | 8.87 | 85.86 | 14.62 |
| 4344 | 4345 | 873-895 | AD-60476.1 | GfsasAfaGfaGfuGfUfCfuCfaUfcUfuCfuUfL96 | asAfsgAfaGfaUfgAfg(Agn)cAfcUfcUfuUfcsusg | 21.48 | 5.53 | 88.73 | 25.48 |
| 4346 | 4347 | 873-895 | AD-60481.1 | GfsasAfaGfaGfuGfUfCfuCfaUfcUfuCfu(Tgn)L96 | asAfsgAfaGfaUfgAfgacAfcUfcUfuUfcsusg | 15.18 | 4.19 | 68.10 | 6.86 |
| 4348 | 4349 | 873-895 | AD-60486.1 | GfsasAfaGfaGfuGfUfCfuCfaUfcUfuCf(Tgn)UfL96 | asAfsgAfaGfaUfgAfgacAfcUfcUfuUfcsusg | 15.31 | 0.31 | 74.06 | 8.48 |
| 4350 | 4351 | 873-895 | AD-60448.1 | GfsasAfaGfaGfuGfUfCfuCfaUfcUfu(Cgn)uUfL96 | asAfsgAfaGfaUfgAfgacAfcUfcUfuUfcsusg | 14.89 | 1.35 | 59.22 | 6.64 |
| 4352 | 4353 | 873-895 | AD-60454.1 | GfsasAfaGfaGfuGfUfCfuCfaUfcUf(Tgn)CfuUfL96 | asAfsgAfaGfaUfgAfgacAfcUfcUfuUfcsusg | 19.24 | 5.72 | 75.90 | 1.27 |
| 4354 | 4355 | 873-895 | AD-60460.1 | GfsasAfaGfaGfuGfUfCfuCfaUfc(Tgn)uCfuUfL96 | asAfsgAfaGfaUfgAfgacAfcUfcUfuUfcsusg | 14.91 | 5.84 | 60.11 | 6.01 |
| 4356 | 4357 | 873-895 | AD-60466.1 | GfsasAfaGfaGfuGfUfCfuCfaUf(Cgn)UfuCfuUfL96 | asAfsgAfaGfaUfgAfgacAfcUfcUfuUfcsusg | 13.99 | 7.53 | 56.83 | 11.59 |
| 4358 | 4359 | 873-895 | AD-60472.1 | GfsasAfaGfaGfuGfUfCfuCfa(Tgn)cUfuCfuUfL96 | asAfsgAfaGfaUfgAfgacAfcUfcUfuUfcsusg | 12.35 | 0.60 | 64.36 | 11.74 |
| 4360 | 4361 | 873-895 | AD-60477.1 | GfsasAfaGfaGfuGfUfCfuCf(Agn)UfcUfuCfuUfL96 | asAfsgAfaGfaUfgAfgacAfcUfcUfuUfcsusg | 15.62 | 1.76 | 65.96 | 7.77 |
| 4362 | 4363 | 873-895 | AD-60482.1 | GfsasAfaGfaGfuGfUfCfu(Cgn)aUfcUfuCfuUfL96 | asAfsgAfaGfaUfgAfgacAfcUfcUfuUfcsusg | 18.58 | 6.43 | 66.67 | 2.31 |
| 4364 | 4365 | 873-895 | AD-60487.1 | GfsasAfaGfaGfuGfUfCf(Tgn)CfaUfcUfuCfuUfL96 | asAfsgAfaGfaUfgAfgacAfcUfcUfuUfcsusg | 34.89 | 15.62 | 86.39 | 6.10 |
| 4366 | 4367 | 873-895 | AD-60449.1 | GfsasAfaGfaGfuGfUf(Cgn)uCfaUfcUfuCfuUfL96 | asAfsgAfaGfaUfgAfgacAfcUfcUfuUfcsusg | 22.65 | | 80.09 | 0.75 |
| 4368 | 4369 | 873-895 | AD-60455.1 | GfsasAfaGfaGfuGf(Tgn)CfuCfaUfcUfuCfuUfL96 | asAfsgAfaGfaUfgAfgacAfcUfcUfuUfcsusg | 31.05 | 2.82 | 104.24 | 23.01 |
| 4370 | 4371 | 873-895 | AD-60461.1 | GfsasAfaGfaGfuGfUfCfuCfaUfcUfu(Cgn)uUfL96 | asAfs(Ggn)AfaGfaUfgAfgacAfcUfcUfuUfcsusg | 16.30 | 2.08 | 85.78 | 22.00 |
| 4372 | 4373 | 873-895 | AD-60467.1 | GfsasAfaGfaGfuGfUfCfuCfaUfcUf(Tgn)CfuUfL96 | asAfsg(Agn)aGfaUfgAfgacAfcUfcUfuUfcsusg | 17.77 | 8.38 | 82.16 | 18.92 |
| 4374 | 4375 | 873-895 | AD-60473.1 | GfsasAfaGfaGfuGfUfCfuCfaUfc(Tgn)uCfuUfL96 | asAfsgAf(Agn)GfaUfgAfgacAfcUfcUfuUfcsusg | 14.64 | 4.25 | 61.05 | 7.88 |
| 4376 | 4377 | 873-895 | n/a | GfsasAfaGfaGfuGfUfCfuCfaUf(Cgn)UfuCfuUfL96 | asAfsgAfa(Ggn)aUfgAfgacAfcUfcUfuUfcsusg | | | | |
| 4378 | 4379 | 873-895 | AD-60483.1 | GfsasAfaGfaGfuGfUfCfuCfa(Tgn)cUfuCfuUfL96 | asAfsgAfaGf(Agn)UfgAfgacAfcUfcUfuUfcsusg | 26.18 | 2.83 | 91.12 | 16.03 |
| 4380 | 4381 | 873-895 | AD-60488.1 | GfsasAfaGfaGfuGfUfCfuCf(Agn)UfcUfuCfuUfL96 | asAfsgAfaGfa(Tgn)gAfgacAfcUfcUfuUfcsusg | 24.74 | 0.56 | 87.66 | 7.90 |
| 4382 | 4383 | 873-895 | AD-60450.1 | GfsasAfaGfaGfuGfUfCfu(Cgn)aUfcUfuCfuUfL96 | asAfsgAfaGfaUf(Ggn)AfgacAfcUfcUfuUfcsusg | 37.09 | 2.89 | 111.90 | 1.97 |
| 4384 | 4385 | 873-895 | AD-60456.1 | GfsasAfaGfaGfuGfUfCf(Tgn)CfaUfcUfuCfuUfL96 | asAfsgAfaGfaUfg(Agn)gacAfcUfcUfuUfcsusg | 41.82 | 0.60 | 102.56 | 11.25 |
| 4386 | 4387 | 873-895 | AD-60462.1 | GfsasAfaGfaGfuGfUf(Cgn)uCfaUfcUfuCfuUfL96 | asAfsgAfaGfaUfgAf(Ggn)acAfcUfcUfuUfcsusg | 38.91 | 3.89 | 122.47 | 35.17 |
| 4388 | 4389 | 873-895 | AD-60468.1 | GfsasAfaGfaGfuGf(Tgn)CfuCfaUfcUfuCfuUfL96 | asAfsgAfaGfaUfgAfg(Agn)cAfcUfcUfuUfcsusg | 28.44 | 3.05 | 97.09 | 2.66 |
| 4390 | 4391 | 873-895 | AD-60550.1 | GfsasAfaGfaGfuGfUfCfuCfaUfcUfuCfuUfsL96 | asAfsgAfaGfaUfgAfgacAfcUfcUfuUfcsusg | 20.35 | 0.63 | 69.13 | 22.65 |
| 4392 | 4393 | 873-895 | AD-60555.1 | GfsasAfaGfaGfuGfUfCfuCfaUfscUfsuCfuUfsL96 | asAfsgAfaGfaUfgAfgacAfcUfcUfuUfcsusg | 19.17 | 8.76 | 68.86 | 17.72 |
| 4394 | 4395 | 873-895 | AD-60560.1 | GfsasAfaGfaGfuGfUfCfuCfaUfcUfuCfuUfsL96 | asAfsgAfaGfaUfgAfgacAfcUfscUfsuUfscsusg | 25.71 | 5.66 | 67.63 | 27.72 |
| 4396 | 4397 | 873-895 | AD-60565.1 | GfsasAfaGfaGfuGfUfCfuCfaUfscUfsuCfuUfsL96 | asAfsgAfaGfaUfgAfgacAfcUfscUfsuUfscsusg | 22.78 | 7.32 | 74.11 | 1.85 |

[0945] As is shown in the table above, in this in vitro screen, the siRNAs that provided the greatest ALAS1 mRNA suppression (greater than 80% suppression, such that less than 20% mRNA was remaining) at 10 nM concentration included AD-58632, AD-60472, AD-60423, AD-60445, AD-60423, AD-60417, AD-60466, AD-60473, AD-60434, AD-60448, AD-60460, AD-60411, AD-60481, AD-60486, and AD-60453, AD-60480, AD-60405, AD-60477, AD-60461, AD-60470, AD-60467, AD-60482, AD-60446, AD-60555, AD-60454, AD-60469 and AD-60463. Furthermore, in this in vitro screen, the siRNAs that provided the greatest ALAS1 mRNA suppression (greater than 30% suppression, such that less than 70% mRNA was remaining) at 0.1 nM concentration included AD-60423, AD-58632, AD-60434, AD-60423, AD-60466, AD-60419, AD-60438, AD-60448, AD-60460, AD-60473, AD-60411, AD-60405, AD-60472, AD-60477, AD-60417, AD-60480, AD-60482, AD-60421, AD-60560, AD-60433, AD-60481, AD-60475, AD-60555, AD-60437, AD-60550, AD-60415, AD-60463, and AD-60443.

[0946] As is shown in the table below, testing of further siRNAs revealed that the following duplexes provided greater than 80% suppression at 10 nM concentration: AD-58632, AD-60405, AD-60423, AD-60434, AD-60445, AD-60480, AD-60460, and AD-60466, and the following duplexes provided greater than 30% suppression at 0.1 nM concentration: AD-58632, AD-60405, AD-60423, AD-60434, AD-60419, AD-60480, AD-60460, and AD-60466.

TABLE 26
Further sequences and in vitro screen results for AD-58632 and AD-58632 derivative siRNAs

| | | Target | | | | | | | |
|---|---|---|---|---|---|---|---|---|---|
| | | sites | | | | | | | |
| | | of | | | | | | | |
| | SEQ | anti- | | | | | | | |
| | ID | sense | | | | | | | |
| SEQ | NO: | seq | | | | | | | |
| ID NO: | (anti- | on | Duplex | | | Avg | SD | Avg | SD |
| (sense) | sense) | NM_000688.4 | Name | Sense Sequence (5′-3′) | Antisense (AS) Sequence (5′-3′) | 10 nM | 10 nM | 0.1 nM | 0.1 nM |
| 4398 | 4399 | 873-895 | AD- | GfsasAfaGfaGfuGfUfCfuCfaUfcUfuCfuUfL96 | asAfsgAfaGfaUfgAfgacAfcUfcUfuUfcsusg | 11.8 | 2.7 | 46.7 | 4.2 |
| | | | 58632.8 | | | | | | |
| 4400 | 4401 | 873-895 | AD- | GfsasAfaGfaGfuGfuCfuCfaucuuCfuuL96 | asAfsgAfaGfaUfgAfgacAfcUfcUfuUfcsusg | 15.6 | 4.5 | 63.5 | 10.5 |
| | | | 60405.1 | | | | | | |
| 4402 | 4403 | 873-895 | | GfsasAfaGfaGfuGfuCfuCfaucuuCfuuL96 | asAfsGfAfaGfaugAfgAfcAfcucuuucsusg | | | | |
| 4404 | 4405 | 873-895 | | GfsasAfaGfaGfuGfuCfuCfaucuuCfuuL96 | asAfsgAfaGfaugAfgAfcAfcucuuucsusg | | | | |
| 4406 | 4407 | 873-895 | | GfsasAfaGfaGfuGfuCfuCfaucuuCfuuL96 | asAfsgAfaGfaugAfgacAfcucuuucsusg | | | | |
| 4408 | 4409 | 873-895 | AD- | gsasaagaGfuGfuCfuCfaucuucuuL96 | asAfsGfAfaGfaUfgAfgAfcAfcfcUfuUfcsusg | 13.8 | 3.4 | 55.9 | 7.9 |
| | | | 60423.2 | | | | | | |
| 4410 | 4411 | 873-895 | | gsasaagaGfuGfuCfuCfaucuucuuL96 | asAfsgAfaGfaUfgAfgacAfcUfcUfuUfcsusg | | | | |
| 4412 | 4413 | 873-895 | | gsasaagaGfuGfuCfuCfaucuucuuL96 | asAfsGfAfaGfaugAfgAfcAfcucuuucsusg | | | | |
| 4414 | 4415 | 873-895 | | gsasaagaGfuGfuCfuCfaucuucuuL96 | asAfsgAfaGfaugAfgAfcAfcucuuucsusg | | | | |
| 4416 | 4417 | 873-895 | | gsasaagaGfuGfuCfuCfaucuucuuL96 | asAfsgAfaGfaugAfgacAfcucuuucsusg | | | | |
| 4418 | 4419 | 873-895 | AD- | gsasaagaGfuGfuCfucaucuucuuL96 | asAfsGfAfaGfaUfgAfgAfcAfcUfcUfuUfcsusg | 14.7 | 2.8 | 48.7 | 6.6 |
| | | | 60434.1 | | | | | | |
| 4420 | 4421 | 873-895 | | gsasaagaGfuGfuCfucaucuucuuL96 | asAfsgAfaGfaUfgAfgacAfcUfcUfuUfcsusg | | | | |
| 4422 | 4423 | 873-895 | | gsasaagaGfuGfuCfucaucuucuuL96 | asAfsGfAfaGfaugAfgAfcAfcucuuucsusg | | | | |
| 4424 | 4425 | 873-895 | | gsasaagaGfuGfuCfucaucuucuuL96 | asAfsgAfaGfaugAfgAfcAfcucuuucsusg | | | | |
| 4426 | 4427 | 873-895 | | gsasaagaGfuGfuCfucaucuucuuL96 | asAfsgAfaGfaugAfgacAfcucuuucsusg | | | | |
| 4428 | 4429 | 873-895 | AD- | GfsasAfaGfAfGfuGfdTcucaucuucuuL96 | asAfsGfAfaGfaugAfgAfcAfcucuuucsusg | 20.8 | 15.1 | 57.8 | 8.3 |
| | | | 60419.1 | | | | | | |
| 4430 | 4431 | 873-895 | | GfsasAfaGfAfGfuGfdTcucaucuucuuL96 | asAfsgAfaGfaUfgAfgacAfcUfcUfuUfcsusg | | | | |
| 4432 | 4433 | 873-895 | | GfsasAfaGfAfGfuGfdTcucaucuucuuL96 | asAfsGfAfaGfaugAfgAfcAfcucuuucsusg | | | | |
| 4434 | 4435 | 873-895 | | GfsasAfaGfAfGfuGfdTcucaucuucuuL96 | asAfsgAfaGfaugAfgAfcAfcucuuucsusg | | | | |
| 4436 | 4437 | 873-895 | | GfsasAfaGfAfGfuGfdTcucaucuucuuL96 | asAfsgAfaGfaugAfgacAfcucuuucsusg | | | | |
| 4438 | 4439 | 873-895 | AD- | GfsasAfaGfAfGfuGfucucauc(Tgn)ucuuL96 | asAfsGfAfaGfaugAfgAfcAfcucuuucsusg | 13.3 | 3.3 | 78.1 | 4.0 |
| | | | 60445.1 | | | | | | |
| 4440 | 4441 | 873-895 | | GfsasAfaGfAfGfuGfucucauc(Tgn)ucuuL96 | asAfsgAfaGfaUfgAfgacAfcUfcUfuUfcsusg | | | | |
| 4442 | 4443 | 873-895 | | GfsasAfaGfAfGfuGfucucauc(Tgn)ucuuL96 | asAfsGfAfaGfaugAfgAfcAfcucuuucsusg | | | | |
| 4444 | 4445 | 873-895 | | GfsasAfaGfAfGfuGfucucauc(Tgn)ucuuL96 | asAfsgAfaGfaugAfgAfcAfcucuuucsusg | | | | |
| 4446 | 4447 | 873-895 | | GfsasAfaGfAfGfuGfucucauc(Tgn)ucuuL96 | asAfsgAfaGfaugAfgacAfcucuuucsusg | | | | |
| 4448 | 4449 | 873-895 | AD- | GfsasAfaGfaGfuGfUfCfuCfaUfcUfuCfuUfL96 | asAfsgAf(Agn)GfaUfgAfgacAfcUfcUfuUfcsu | 15.5 | 1.2 | 66.4 | 14.3 |
| | | | 60480.1 | | sg | | | | |
| 4450 | 4451 | 873-895 | | gsasaagaGfuGfuCfuCfaucuucuuL96 | asAfsgAf(Agn)GfaUfgAfgacAfcUfcUfuUfcsu | | | | |
| | | | | | sg | | | | |
| 4452 | 4453 | 873-895 | | gsasaagaGfuGfuCfucaucuucuuL96 | asAfsgAf(Agn)GfaUfgAfgacAfcUfcUfuUfcsu | | | | |
| | | | | | sg | | | | |
| 4454 | 4455 | 873-895 | | GfsasAfaGfAfGfuGfdTcucaucuucuuL96 | asAfsgAf(Agn)GfaUfgAfgacAfcUfcUfuUfcsu | | | | |
| | | | | | sg | | | | |
| 4456 | 4457 | 873-895 | | GfsasAfaGfAfGfuGfucucauc(Tgn)ucuuL96 | asAfsgAf(Agn)GfaUfgAfgacAfcUfcUfuUfcsu | | | | |
| | | | | | sg | | | | |
| 4458 | 4459 | 873-895 | | GfsasAfaGfAfGfuGfucucaucs(Tgns)ucuuL96 | asAfsgAfs(Agns)GfaUfgAfgacAfcUfcUfuUfc | | | | |
| | | | | | susg | | | | |
| 4460 | 4461 | 873-895 | | GfsasAfaGfaGfuGfUfCfuCfaUfcUfuCfuUfL96 | asAfsgAf(Agn)GfaugAfgacAfcucuuucsusg | | | | |
| 4462 | 4463 | 873-895 | | gsasaagaGfuGfuCfuCfaucuucuuL96 | asAfsgAf(Agn)GfaugAfgacAfcucuuucsusg | | | | |
| 4464 | 4465 | 873-895 | | gsasaagaGfuGfuCfucaucuucuuL96 | asAfsgAf(Agn)GfaugAfgacAfcucuuucsusg | | | | |
| 4466 | 4467 | 873-895 | | GfsasAfaGfAfGfuGfdTcucaucuucuuL96 | asAfsgAf(Agn)GfaugAfgacAfcucuuucsusg | | | | |
| 4468 | 4469 | 873-895 | | GfsasAfaGfAfGfuGfucucauc(Tgn)ucuuL96 | asAfsgAf(Agn)GfaugAfgacAfcucuuucsusg | | | | |
| 4470 | 4471 | 873-895 | | GfsasAfaGfAfGfuGfucucaucs(Tgns)ucuuL96 | asAfsgAfs(Agns)GfaugAfgacAfcucuuucsusg | | | | |
| 4472 | 4473 | 873-895 | AD- | GfsasAfaGfaGfuGfUfCfuCfaUfcUfuCfuUfL96 | asAfsgAfaGfaUfgAfgacAfcUfcUfuUfcsusg | 11.8 | 2.7 | 46.7 | 4.2 |
| | | | 58632.8 | | | | | | |
| 4474 | 4475 | 873-895 | | GfsasAfaGfaGfuGfdTCfuCfaUfcUfuCfuUfL96 | asAfsgAfaGfaUfgAfgacAfcUfcUfuUfcsusg | | | | |
| 4476 | 4477 | 873-895 | | GfsasAfaGfaGfuGfUfCfuCfaUfcUfuCfuUfL96 | asAfsgAfaGfaUfgAfgacAfcdTcUfuUfcsusg | | | | |
| 4478 | 4479 | 873-895 | | GfsasAfaGfaGfuGfdTCfuCfaUfcUfuCfuUfL96 | asAfsgAfaGfaUfgAfgacAfcdTcUfuUfcsusg | | | | |
| 4480 | 4481 | 873-895 | | GfsasAfaGfaGfuGfdTCfuCfaUfcUfsuCfsuUfs | asAfsgAfaGfaUfgAfgacAfcdTcUfuUfcsusg | | | | |
| | | | | L96 | | | | | |
| 4482 | 4483 | 873-895 | | GfsasAfaGfaGfuGfdTCfuCfaUfcUfsucsuUfsL | asAfsGfAfaGfaUfgAfgacAfcdTcUfuUfcsusg | | | | |
| | | | | 96 | | | | | |
| 4484 | 4485 | 873-895 | AD- | GfsasAfaGfaGfuGfUfCfuCfaUfc(Tgn)uCfuUf | asAfsgAfaGfaUfgAfgacAfcUfcUfuUfcsusg | 14.9 | 5.8 | 60.1 | 6.0 |
| | | | 60460.1 | L96 | | | | | |
| 4486 | 4487 | 873-895 | | GfsasAfaGfaGfuGfdTCfuCfaUfc(Tgn)uCfuUf | asAfsgAfaGfaUfgAfgacAfcUfcUfuUfcsusg | | | | |
| | | | | L96 | | | | | |
| 4488 | 4489 | 873-895 | | GfsasAfaGfaGfuGfUfCfuCfaUfc(Tgn)uCfuUf | asAfsgAfaGfaUfgAfgacAfcdTcUfuUfcsusg | | | | |
| | | | | L96 | | | | | |
| 4490 | 4491 | 873-895 | | GfsasAfaGfaGfuGfdTCfuCfaUfc(Tgn)uCfuUf | asAfsgAfaGfaUfgAfgacAfcdTcUfuUfcsusg | | | | |
| | | | | L96 | | | | | |
| 4492 | 4493 | 873-895 | | GfsasAfaGfaGfuGfdTCfuCfaUfc(Tgn)suCfsu | asAfsgAfaGfaUfgAfgacAfcdTcUfuUfcsusg | | | | |
| | | | | UfsL96 | | | | | |
| 4494 | 4495 | 873-895 | | GfsasAfaGfaGfuGfdTCfuCfaUfc(Tgn)sucsuU | asAfsGfAfaGfaUfgAfgacAfcdTcUfuUfcsusg | | | | |
| | | | | fsL96 | | | | | |
| 4496 | 4497 | 873-895 | AD- | GfsasAfaGfaGfuGfUfCfuCfaUf(Cgn)UfuCfuU | asAfsgAfaGfaUfgAfgacAfcUfcUfuUfcsusg | 14.0 | 7.5 | 56.8 | 11.6 |
| | | | 60466.1 | fL96 | | | | | |
| 4498 | 4499 | 873-895 | | GfsasAfaGfaGfuGfdTCfuCfaUf(Cgn)UfuCfuU | asAfsgAfaGfaUfgAfgacAfcUfcUfuUfcsusg | | | | |
| | | | | fL96 | | | | | |
| 4500 | 4501 | 873-895 | | GfsasAfaGfaGfuGfUfCfuCfaUf(Cgn)UfuCfuU | asAfsgAfaGfaUfgAfgacAfcdTcUfuUfcsusg | | | | |
| | | | | fL96 | | | | | |
| 4502 | 4503 | 873-895 | | GfsasAfaGfaGfuGfdTCfuCfaUf(Cgn)UfuCfuU | asAfsgAfaGfaUfgAfgacAfcdTcUfuUfcsusg | | | | |
| | | | | fL96 | | | | | |
| 4504 | 4505 | 873-895 | | GfsasAfaGfaGfuGfdTCfuCfaUf(Cgn)UfsuCfs | asAfsgAfaGfaUfgAfgacAfcdTcUfuUfcsusg | | | | |
| | | | | uUfsL96 | | | | | |
| 4506 | 4507 | 873-895 | | GfsasAfaGfaGfuGfdTCfuCfaUf(Cgn)Ufsucsu | asAfsGfAfaGfaUfgAfgacAfcdTcUfuUfcsusg | | | | |
| | | | | UfsL96 | | | | | |

TABLE 27
Further sequences of AD-58632 derivative siRNAs

| | SEQ | Target | | | |
|---|---|---|---|---|---|
| | ID | sites of | | | |
| SEQ ID | NO: | antisense | | | |
| NO: | (anti- | sequence | Duplex | | |
| (sense) | sense) | on NM_{—} | Name | Sense Sequence (5′-3′) | Antisense Sequence (5′-3′) |
| 4508 | 4509 | 873-895 | AD- | GfsasAfaGfaGfuGfUfCfuCfaUfc | asAfsgAfaGfaUfgAfgacAfcUfcUfuUfcsusg |
| | | | 58632 | UfuCfuUfL96 | |
| 4510 | 4511 | 873-895 | AD- | GfsasAfaGfaGfuGfuCfuCfaucuu | asAfsgAfaGfaUfgAfgacAfcUfcUfuUfcsusg |
| | | | 60405.1 | CfuuL96 | |
| 4512 | 4513 | 873-895 | AD- | GfsasAfaGfaGfuGfuCfuCfauc | asAfsGfAfaGfaugAfgAfcAfcucuuucsusg |
| | | | 60887 | uuCfuuL96 | |
| 4514 | 4515 | 873-895 | AD- | GfsasAfaGfaGfuGfuCfuCfauc | asAfsGfAfaGfaUfgAfgAfcAfcUfcUfuUfcsusg |
| | | | 60923 | uuCfuuL96 | |
| 4516 | 4517 | 873-895 | AD- | gsasaagaGfuGfuCfucaucuucuuL96 | asAfsGfAfaGfaUfgAfgAfcAfcUfcUfuUfcsusg |
| | | | 60434.1 | | |
| 4518 | 4519 | 873-895 | AD- | gsasaagaGfuGfuCfucaucuucuuL96 | asAfsGfAfaGfaugAfgAfcAfcucuuucsusg |
| | | | 60892 | | |
| 4520 | 4521 | 873-895 | AD- | gsasaagaGfuGfuCfucaucuucuuL96 | asAfsgAfaGfaUfgAfgacAfcUfcUfuUfcsusg |
| | | | 60891 | | |
| 4522 | 4523 | 873-895 | AD- | GfsasAfaGfAfGfuGfdTcucauc | asAfsGfAfaGfaugAfgAfcAfcucuuucsusg |
| | | | 60419.1 | uucuuL96 | |
| 4524 | 4525 | 873-895 | AD- | GfsasAfaGfAfGfuGfdTcucauc | asAfsGfAfaGfaUfgAfgAfcAfcUfcUfuUfcsusg |
| | | | 60924 | uucuuL96 | |
| 4526 | 4527 | 873-895 | AD- | GfsasAfaGfAfGfuGfdTcucauc | asAfsgAfaGfaUfgAfgacAfcUfcUfuUfcsusg |
| | | | 60885 | uucuuL96 | |
| 4528 | 4529 | 873-895 | AD- | GfsasAfaGfAfGfuGfucucauc | asAfsGfAfaGfaugAfgAfcAfcucuuucsusg |
| | | | 60445.1 | (Tgn)ucuuL96 | |
| 4530 | 4531 | 873-895 | AD- | GfsasAfaGfAfGfuGfucucauc | asAfsGfAfaGfaUfgAfgAfcAfcUfcUfuUfcsusg |
| | | | 60925 | (Tgn)ucuuL96 | |
| 4532 | 4533 | 873-895 | AD- | GfsasAfaGfAfGfuGfucucauc | asAfsgAfaGfaUfgAfgacAfcUfcUfuUfcsusg |
| | | | 60890 | (Tgn)ucuuL96 | |
| 4534 | 4535 | 873-895 | AD- | GfsasAfaGfaGfuGfUfCfuCfaU | asAfsGfAfaGfaUfgAfgAfcAfcUfcUfuUfcsusg |
| | | | 60926 | fcUfuCfuUfL96 | |

### IC50s Based on In Vitro Activity

[0947] Similar to the experiments described above, further dose-response experiments were done at 10 nM, 1.66667 nM, 0.277778 nM, 0.046296 nM, 0.007716 nM, 0.001286 nM, 0.000214 nM, and 3.57E-05 nM final duplex concentration, and IC50 values were calculated.

TABLE 28
Further sequences and IC50s of AD-58632 and AD-58632 derivative siRNAs

| | | Target | | | | |
|---|---|---|---|---|---|---|
| | SEQ ID NO: | sites of anti- | | | | |
| SEQ ID NO: | (anti- | sense seq on | | | | |
| (sense) | sense) | NM_000688.4 | Duplex Name | Sense Sequence (5′-3′) | Antisense (AS) Sequence (5′-3′) | IC50 |
| 4536 | 4537 | 873-895 | AD- | GfsasAfaGfaGfuGfUfCfuCfaUfcUfuCfuUfL96 | asAfsgAfaGfaUfgAfgacAfcUfcUfuUfcsusg | 0.017 |
| | | | 58632.10 | | | |
| 4538 | 4539 | 873-895 | AD- | GfsasAfaGfaGfuGfuCfuCfaucuuCfuuL96 | asAfsgAfaGfaUfgAfgacAfcUfcUfuUfcsusg | 0.070 |
| | | | 60405.2 | | | |
| 4540 | 4541 | 873-895 | AD- | GfsasAfaGfaGfuGfuCfuCfaucuuCfuuL96 | asAfsGfAfaGfaugAfgAfcAfcucuuucsusg | 0.120 |
| | | | 60887.1 | | | |
| 4542 | 4543 | 873-895 | AD- | GfsasAfaGfaGfuGfuCfuCfaucuuCfuuL96 | asAfsgAfaGfaugAfgAfcAfcucuuucsusg | 0.009 |
| | | | 60819.1 | | | |
| 4544 | 4545 | 873-895 | AD- | GfsasAfaGfaGfuGfuCfuCfaucuuCfuuL96 | asAfsgAfaGfaugAfgacAfcucuuucsusg | 0.032 |
| | | | 60823.1 | | | |
| 4546 | 4547 | 873-895 | AD- | gsasaagaGfuGfuCfuCfaucuucuuL96 | asAfsGfAfaGfaUfgAfgAfcAfcUfcUfuUfcsusg | 0.020 |
| | | | 60423.3 | | | |
| 4548 | 4549 | 873-895 | AD- | gsasaagaGfuGfuCfuCfaucuucuuL96 | asAfsGfAfaGfaugAfgAfcAfcucuuucsusg | 0.242 |
| | | | 60889.1 | | | |
| 4550 | 4551 | 873-895 | AD- | gsasaagaGfuGfuCfuCfaucuucuuL96 | asAfsgAfaGfaugAfgAfcAfcucuuucsusg | 0.044 |
| | | | 60827.1 | | | |
| 4552 | 4553 | 873-895 | AD- | gsasaagaGfuGfuCfuCfaucuucuuL96 | asAfsgAfaGfaugAfgacAfcucuuucsusg | 0.077 |
| | | | 60831.1 | | | |
| 4554 | 4555 | 873-895 | AD- | gsasaagaGfuGfuCfucaucuucuuL96 | asAfsGfAfaGfaUfgAfgAfcAfcUfcUfuUfcsusg | 0.028 |
| | | | 60434.2 | | | |
| 4556 | 4557 | 873-895 | AD- | gsasaagaGfuGfuCfucaucuucuuL96 | asAfsgAfaGfaUfgAfgacAfcUfcUfuUfcsusg | 0.078 |
| | | | 60891.1 | | | |
| 4558 | 4559 | 873-895 | AD- | gsasaagaGfuGfuCfucaucuucuuL96 | asAfsGfAfaGfaugAfgAfcAfcucuuucsusg | 0.138 |
| | | | 60892.1 | | | |
| 4560 | 4561 | 873-895 | AD- | gsasaagaGfuGfuCfucaucuucuuL96 | asAfsgAfaGfaugAfgAfcAfcucuuucsusg | 0.015 |
| | | | 60835.1 | | | |
| 4562 | 4563 | 873-895 | AD- | gsasaagaGfuGfuCfucaucuucuuL96 | asAfsgAfaGfaugAfgacAfcucuuucsusg | 0.014 |
| | | | 60839.1 | | | |
| 4564 | 4565 | 873-895 | AD- | GfsasAfaGfAfGfuGfdTcucaucuucuuL96 | asAfsGfAfaGfaugAfgAfcAfcucuuucsusg | 0.014 |
| | | | 60419.2 | | | |
| 4566 | 4567 | 873-895 | AD- | GfsasAfaGfAfGfuGfdTcucaucuucuuL96 | asAfsgAfaGfaUfgAfgacAfcUfcUfuUfcsusg | 0.091 |
| | | | 60885.1 | | | |
| 4568 | 4569 | 873-895 | AD- | GfsasAfaGfAfGfuGfdTcucaucuucuuL96 | asAfsGfAfaGfaugAfgAfcAfcucuuucsusg | 0.026 |
| | | | 60419.3 | | | |
| 4570 | 4571 | 873-895 | AD- | GfsasAfaGfAfGfuGfdTcucaucuucuuL96 | asAfsgAfaGfaugAfgAfcAfcucuuucsusg | 0.004 |
| | | | 60843.1 | | | |
| 4572 | 4573 | 873-895 | AD- | GfsasAfaGfAfGfuGfdTcucaucuucuuL96 | asAfsgAfaGfaugAfgacAfcucuuucsusg | 0.012 |
| | | | 60847.1 | | | |
| 4574 | 4575 | 873-895 | AD- | GfsasAfaGfAfGfuGfucucauc(Tgn)ucuu | asAfsGfAfaGfaugAfgAfcAfcucuuucsusg | 0.077 |
| | | | 60445.2 | L96 | | |
| 4576 | 4577 | 873-895 | AD- | GfsasAfaGfAfGfuGfucucauc(Tgn)ucuu | asAfsgAfaGfaUfgAfgacAfcUfcUfuUfcsusg | 1.201 |
| | | | 60890.1 | L96 | | |
| 4578 | 4579 | 873-895 | AD- | GfsasAfaGfAfGfuGfucucauc(Tgn)ucuu | asAfsGfAfaGfaugAfgAfcAfcucuuucsusg | 0.302 |
| | | | 60445.3 | L96 | | |
| 4580 | 4581 | 873-895 | AD- | GfsasAfaGfAfGfuGfucucauc(Tgn)ucuu | asAfsgAfaGfaugAfgAfcAfcucuuucsusg | 0.006 |
| | | | 60820.1 | L96 | | |
| 4582 | 4583 | 873-895 | AD- | GfsasAfaGfAfGfuGfucucauc(Tgn)ucuu | asAfsgAfaGfaugAfgacAfcucuuucsusg | 0.032 |
| | | | 60824.1 | L96 | | |
| 4584 | 4585 | 873-895 | AD- | GfsasAfaGfaGfuGfUfCfuCfaUfcUfuCfu | asAfsgAf(Agn)GfaUfgAfgacAfcUfcUfuUfcsu | 0.066 |
| | | | 60480.2 | UfL96 | sg | |
| 4586 | 4587 | 873-895 | AD- | gsasaagaGfuGfuCfuCfaucuucuuL96 | asAfsgAf(Agn)GfaUfgAfgacAfcUfcUfuUfcsu | 0.034 |
| | | | 60893.1 | | sg | |
| 4588 | 4589 | 873-895 | AD- | gsasaagaGfuGfuCfucaucuucuuL96 | asAfsgAf(Agn)GfaUfgAfgacAfcUfcUfuUfcsu | 0.157 |
| | | | 60884.1 | | sg | |
| 4590 | 4591 | 873-895 | AD- | GfsasAfaGfAfGfuGfdTcucaucuucuuL96 | asAfsgAf(Agn)GfaUfgAfgacAfcUfcUfuUfcsu | 0.801 |
| | | | 60886.1 | | sg | |
| 4592 | 4593 | 873-895 | AD- | GfsasAfaGfAfGfuGfucucauc(Tgn)ucuu | asAfsgAf(Agn)GfaUfgAfgacAfcUfcUfuUfcsu | 0.201 |
| | | | 60888.1 | L96 | sg | |
| 4594 | 4595 | 873-895 | AD- | GfsasAfaGfAfGfuGfucucaucs(Tgns)uc | asAfsgAfs(Agns)GfaUfgAfgacAfcUfcUfuUfc | 0.145 |
| | | | 60828.1 | uuL96 | susg | |
| 4596 | 4597 | 873-895 | AD- | GfsasAfaGfaGfuGfUfCfuCfaUfcUfuCfu | asAfsgAf(Agn)GfaugAfgacAfcucuuucsusg | 0.036 |
| | | | 60832.1 | UfL96 | | |
| 4598 | 4599 | 873-895 | AD- | gsasaagaGfuGfuCfuCfaucuucuuL96 | asAfsgAf(Agn)GfaugAfgacAfcucuuucsusg | 0.076 |
| | | | 60836.1 | | | |
| 4600 | 4601 | 873-895 | AD- | gsasaagaGfuGfuCfucaucuucuuL96 | asAfsgAf(Agn)GfaugAfgacAfcucuuucsusg | 0.033 |
| | | | 60840.1 | | | |
| 4602 | 4603 | 873-895 | AD- | GfsasAfaGfAfGfuGfdTcucaucuucuuL96 | asAfsgAf(Agn)GfaugAfgacAfcucuuucsusg | 0.017 |
| | | | 60844.1 | | | |
| 4604 | 4605 | 873-895 | AD- | GfsasAfaGfAfGfuGfucucauc(Tgn)ucuu | asAfsgAf(Agn)GfaugAfgacAfcucuuucsusg | 0.007 |
| | | | 60848.1 | L96 | | |
| 4606 | 4607 | 873-895 | AD- | GfsasAfaGfAfGfuGfucucaucs(Tgns)uc | asAfsgAfs(Agns)GfaugAfgacAfcucuuucsusg | 0.076 |
| | | | 60821.1 | uuL96 | | |
| 4608 | 4609 | 873-895 | AD- | GfsasAfaGfaGfuGfUfCfuCfaUfcUfuCfu | asAfsgAfaGfaUfgAfgacAfcUfcUfuUfcsusg | 0.063 |
| | | | 58632.11 | UfL96 | | |
| 4610 | 4611 | 873-895 | AD- | GfsasAfaGfaGfuGfdTCfuCfaUfcUfuCfuUfL96 | asAfsgAfaGfaUfgAfgacAfcUfcUfuUfcsusg | 0.031 |
| | | | 60825.1 | | | |
| 4612 | 4613 | 873-895 | AD- | GfsasAfaGfaGfuGfUfCfuCfaUfcUfuCfuUfL96 | asAfsgAfaGfaUfgAfgacAfcdTcUfuUfcsusg | 0.033 |
| | | | 60829.1 | | | |
| 4614 | 4615 | 873-895 | AD- | GfsasAfaGfaGfuGfdTCfuCfaUfcUfuCfuUfL96 | asAfsgAfaGfaUfgAfgacAfcdTcUfuUfcsusg | 0.100 |
| | | | 60833.1 | | | |
| 4616 | 4617 | 873-895 | AD- | GfsasAfaGfaGfuGfdTCfuCfaUfcUfsuCfsuUfsL96 | asAfsgAfaGfaUfgAfgacAfcdTcUfuUfcsusg | 0.031 |
| | | | 60837.1 | | | |
| 4618 | 4619 | 873-895 | AD- | GfsasAfaGfaGfuGfdTCfuCfaUfcUfsucsuUfsL96 | asAfsGfAfaGfaUfgAfgacAfcdTcUfuUfcsusg | 0.010 |
| | | | 60841.1 | | | |
| 4620 | 4621 | 873-895 | AD- | GfsasAfaGfaGfuGfUfCfuCfaUfc(Tgn)uCfuUfL96 | asAfsgAfaGfaUfgAfgacAfcUfcUfuUfcsusg | 0.009 |
| | | | 60460.2 | | | |
| 4622 | 4623 | 873-895 | AD- | GfsasAfaGfaGfuGfdTCfuCfaUfc(Tgn)uCfuUfL96 | asAfsgAfaGfaUfgAfgacAfcUfcUfuUfcsusg | 0.002 |
| | | | 60845.1 | | | |
| 4624 | 4625 | 873-895 | AD- | GfsasAfaGfaGfuGfUfCfuCfaUfc(Tgn)uCfuUfL96 | asAfsgAfaGfaUfgAfgacAfcdTcUfuUfcsusg | 0.005 |
| | | | 60849.1 | | | |
| 4626 | 4627 | 873-895 | AD- | GfsasAfaGfaGfuGfdTCfuCfaUfc(Tgn)uCfuUfL96 | asAfsgAfaGfaUfgAfgacAfcdTcUfuUfcsusg | 0.007 |
| | | | 60822.1 | | | |
| 4628 | 4629 | 873-895 | AD- | GfsasAfaGfaGfuGfdTCfuCfaUfc(Tgn)suCfsuUfsL96 | asAfsgAfaGfaUfgAfgacAfcdTcUfuUfcsusg | 0.009 |
| | | | 60826.1 | | | |
| 4630 | 4631 | 873-895 | AD- | GfsasAfaGfaGfuGfdTCfuCfaUfc(Tgn)sucsuUfsL96 | asAfsGfAfaGfaUfgAfgacAfcdTcUfuUfcsusg | 0.019 |
| | | | 60830.1 | | | |
| 4632 | 4633 | 873-895 | AD- | GfsasAfaGfaGfuGfUfCfuCfaUf(Cgn)UfuCfuUfL96 | asAfsgAfaGfaUfgAfgacAfcUfcUfuUfcsusg | 0.066 |
| | | | 60466.2 | | | |
| 4634 | 4635 | 873-895 | AD- | GfsasAfaGfaGfuGfdTCfuCfaUf(Cgn)UuCfuUfL96f | asAfsgAfaGfaUfgAfgacAfcUfcUfuUfcsusg | 0.024 |
| | | | 60834.1 | | | |
| 4636 | 4637 | 873-895 | AD- | GfsasAfaGfaGfuGfUfCfuCfaUf(Cgn)UfuCfuUfL96 | asAfsgAfaGfaUfgAfgacAfcdTcUfuUfcsusg | 0.013 |
| | | | 60838.1 | | | |
| 4638 | 4639 | 873-895 | AD- | GfsasAfaGfaGfuGfdTCfuCfaUf(Cgn)UfuCfuUfL96 | asAfsgAfaGfaUfgAfgacAfcdTcUfuUfcsusg | 0.010 |
| | | | 60842.1 | | | |
| 4640 | 4641 | 873-895 | AD- | GfsasAfaGfaGfuGfdTCfuCfaUf(Cgn)UfsuCfsuUfsL96 | asAfsgAfaGfaUfgAfgacAfcdTcUfuUfcsusg | 0.011 |
| | | | 60846.1 | | | |
| 4642 | 4643 | 873-895 | AD- | GfsasAfaGfaGfuGfdTCfuCfaUf(Cgn)UfsucsuUfsL96 | asAfsGfAfaGfaUfgAfgacAfcdTcUfuUfcsusg | 0.018 |
| | | | 60850.1 | | | |

[0948] As is shown in Table 28, the following duplexes had an IC50 of less than 0.01 nM: AD-60845, AD-60843, AD-60849, AD-60820, AD-60848, AD-60822, AD-60826, AD-60819, and AD-60460.

[0949] The following duplexes had an IC50 of less than 0.02 nM: AD-60845, AD-60843, AD-60849, AD-60820, AD-60848, AD-60822, AD-60826, AD-60819, and AD-60460, AD-60841, AD-60842, AD-60846, AD-60847, AD-60838, AD-60419, AD-60839, AD-60835, AD-586320, AD-60844, AD-60850, and AD-60830.

[0950] The following duplexes had an IC50 of less than 0.05 nM: AD-60845, AD-60843, AD-60849, AD-60820, AD-60848, AD-60822, AD-60826, AD-60819, and AD-60460, AD-60841, AD-60842, AD-60846, AD-60847, AD-60838, AD-60419, AD-60839, AD-60835, AD-586320, AD-60844, AD-60850, AD-60830, AD-60423, AD-60834, AD-60419, AD-60434, AD-60825, AD-60837, AD-60823, AD-60824, AD-60840, AD-60829, AD-60893, AD-60832, and AD-60827.

### Example 25

### In Vivo Structure Activity Relationship Studies of AD-58632

[0951] Derivatives of the AD-58632 parent siRNA were generated and screened in vivo in rats. The sequences of siRNAs that were screened are provided in the table below.

TABLE 29
Sequences of ALAS1 siRNA Duplexes

| | | Target | | | |
|---|---|---|---|---|---|
| | SEQ | sites of | | | |
| SEQ | ID | antisense | | | |
| ID | NO: | sequence | | | |
| NO: | (anti- | on | Duplex | | |
| (sense) | sense) | NM_000688.4 | Name | Sense Sequence (5′-3′) | Antisense Sequence (5′-3′) |
| 4644 | 4645 | 873-895 | AD- | GfsasAfaGfaGfuGfUfCfuCfaUfcUfu | asAfsgAfaGfaUfgAfgacAfcUfcUfuUfcsusg |
| | | | 58632 | CfuUfL96 | |
| 4646 | 4647 | 873-895 | AD- | GfsasAfaGfaGfuGfuCfuCfaucuu | asAfsgAfaGfaUfgAfgacAfcUfcUfuUfcsusg |
| | | | 60405 | CfuuL96 | |
| 4648 | 4649 | 873-895 | AD- | GfsasAfaGfaGfuGfuCfuCfaucuu | asAfsGfAfaGfaugAfgAfcAfcucuuucsusg |
| | | | 60887 | CfuuL96 | |
| 4650 | 4651 | 873-895 | AD- | gsasaagaGfuGfuCfucaucuucuuL96 | asAfsGfAfaGfaUfgAfgAfcAfcUfcUfuUfcsusg |
| | | | 60923 | | |
| 4652 | 4653 | 873-895 | AD- | gsasaagaGfuGfuCfucaucuucuuL96 | asAfsGfAfaGfaUfgAfgAfcAfcUfcUfuUfcsusg |
| | | | 60434 | | |
| 4654 | 4655 | 873-895 | AD- | gsasaagaGfuGfuCfucaucuucuuL96 | asAfsGfAfaGfaugAfgAfcAfcucuuucsusg |
| | | | 60892 | | |
| 4656 | 4657 | 873-895 | AD- | GfsasAfaGfAfGfuGfdTcucauc | asAfsGfAfaGfaugAfgAfcAfcucuuucsusg |
| | | | 60419 | uucuuL96 | |
| 4658 | 4659 | 873-895 | AD- | GfsasAfaGfAfGfuGfdTcucauc | asAfsGfAfaGfaUfgAfgAfcAfcUfcUfuUfcsusg |
| | | | 60924 | uucuuL96 | |
| 4660 | 4661 | 873-895 | AD- | GfsasAfaGfAfGfuGfucucauc | asAfsGfAfaGfaugAfgAfcAfcucuuucsusg |
| | | | 60445 | (Tgn)ucuuL96 | |
| 4662 | 4663 | 873-895 | AD- | GfsasAfaGfAfGfuGfucucauc | asAfsGfAfaGfaUfgAfgAfcAfcUfcUfuUfcsusg |
| | | | 60925 | (Tgn)ucuuL96 | |
| 4664 | 4665 | 873-895 | AD- | GfsasAfaGfaGfuGfUfCfuCfaUfc | asAfsGfAfaGfaUfgAfgAfcAfcUfcUfuUfcsusg |
| | | | 60926 | UfuCfuUfL96 | |

[0952] A single dose of 5 mg/kg of siRNA was administered. At 5 days following administration of the siRNA, mRNA measurements of rat ALAS1 (rALAS1) mRNA and rat GAPDH (rGAPDH) mRNA were made using bDNA assay, and tissue levels of drug were determined using qPCR. The results are provided in FIG. 33 and FIG. 34. As is shown in FIG. 33, at least ten duplexes (AD-60405, AD-60887, AD-60923, AD-60434, AD-60892, AD-60419, AD-60924, AD-60445, AD-60925, and AD-60926) that were screened showed improved suppression of ALAS1 mRNA compared with AD-58632. Furthermore, as is shown FIG. 34, these duplexes (with the exception of AD-60926) achieved higher liver concentrations than did AD-58632.

### Example 26

### Efficacy of AD-60925 and AD-60926 in a Rat AIP Model

[0953] The therapeutic efficacy of AD-60925 and AD-60926 (described in the previous example) was investigated in a rat AIP model. The experimental design is shown in the top of FIG. 35. Rats were treated with PBS or 3 mg/kg ALAS1-GalNAc siRNA t.i.w., Phenobarbital (PB), and a PBGD siRNA in an AF11 LNP formulation (AF11-PBGD) at the times indicated in FIG. 35. Control rats received the PBGD siRNA only, without Phenobarbital induction.

[0954] The results are shown in FIG. 35, FIG. 36 and FIG. 37. Administering Phenobarbital induced ALAS1 mRNA expression and increased levels of PBG and ALA in urine, compared with the control. Treatment with a total of eight doses of 3 mg/kg of AD-60925 or AD-60926 three times per week suppressed ALAS1 mRNA (FIG. 35), urine PBG (FIG. 36 and FIG. 37, top), and urine ALA (FIG. 36 and FIG. 37, bottom) Phenobarbital induced increases in ALAS1 mRNA, urine PBG, and ALA. The time course of treatment effects is shown in FIG. 37. The arrows indicate the timepoints when PB was administered. The siRNA treatment prevented phenobarbital induced increases in in ALAS1 mRNA, urine PBG, and ALA.

[0955] Both AD-60925 and AD-60926 showed therapeutic efficacy treatment of AIP. AD-60925 was even more effective than AD-60926 in suppressing ALAS1 mRNA, urine ALA, and urine PBG.

### Example 27

### Further In Vivo Structure Activity Relationship Studies of AD-58632

[0956] Derivatives of the AD-58632 parent siRNA were generated and screened in vivo in rats.

### In Vivo Screen, Part I

[0957] The sequences of siRNAs that were screened are provided in the table below.

TABLE 30
Sequences of ALAS1 siRNA Duplexes

| | | Target | | | |
|---|---|---|---|---|---|
| | SEQ | sites of | | | |
| SEQ | ID | antisense | | | |
| ID | NO: | sequence | | | |
| NO: | (anti- | on | Duplex | | |
| (sense) | sense) | NM_000688.4 | Name | Sense Sequence (5′-3′) | Antisense Sequence (5′-3′) |
| 4666 | 4667 | 873-895 | AD- | GfsasAfaGfaGfuGfUfCfuCfaUfcUfu | asAfsgAfaGfaUfgAfgacAfcUfcUfuUfcsusg |
| | | | 58632 | CfuUfL96 | |
| 4668 | 4669 | 873-895 | AD- | GfsasAfaGfAfGfuGfucucauc(Tgn) | asAfsgAfaGfaugAfgAfcAfcucuuucsusg |
| | | | 60820 | ucuuL96 | |
| 4670 | 4671 | 873-895 | AD- | GfsasAfaGfAfGfuGfucucauc(Tgn) | asAfsgAfaGfaugAfgacAfcucuuucsusg |
| | | | 60824 | ucuuL96 | |
| 4672 | 4673 | 873-895 | AD- | GfsasAfaGfAfGfuGfucucauc(Tgn) | asAfsgAfaGfaUfgAfgAfcAfcUfcUfuUfcsusg |
| | | | 61137 | ucuuL96 | |
| 4674 | 4675 | 873-895 | AD- | GfsasAfaGfAfGfuGfdTcucaucuu | asAfsgAfaGfaugAfgAfcAfcucuuucsusg |
| | | | 60843 | cuuL96 | |
| 4676 | 4677 | 873-895 | AD- | GfsasAfaGfAfGfuGfdTcucaucuu | asAfsgAfaGfaugAfgacAfcucuuucsusg |
| | | | 60847 | cuuL96 | |
| 4678 | 4679 | 873-895 | AD- | GfsasAfaGfAfGfuGfdTcucaucuu | asAfsgAfaGfaUfgAfgAfcAfcUfcUfuUfcsusg |
| | | | 61138 | cuuL96 | |
| 4680 | 4681 | 873-895 | AD- | GfsasAfaGfaGfuGfuCfuCfaucuu | asAfsgAfaGfaugAfgAfcAfcucuuucsusg |
| | | | 60819 | CfuuL96 | |
| 4682 | 4683 | 873-895 | AD- | GfsasAfaGfaGfuGfuCfuCfaucuu | asAfsgAfaGfaugAfgacAfcucuuucsusg |
| | | | 60823 | CfuuL96 | |
| 4684 | 4685 | 873-895 | AD- | GfsasAfaGfaGfuGfuCfuCfaucuu | asAfsgAfaGfaUfgAfgAfcAfcUfcUfuUfcsusg |
| | | | 61139 | CfuuL96 | |
| 4686 | 4687 | 873-895 | AD- | GfsasAfaGfaGfuGfdTCfuCfaUfc | asAfsgAfaGfaugAfgAfcAfcucuuucsusg |
| | | | 61140 | (Tgn)uCfuUfL96 | |

[0958] Rats were administered four doses of 2.5 mg/kg of siRNA biweekly (two times per week) for two weeks. At 72 hours following administration of the last dose of siRNA, the animals were sacrificed and measurements of rat ALAS1 (rALAS1) mRNA and rat GAPDH (rGAPDH) mRNA levels were made using bDNA assay.

[0959] As is shown in FIG. 38, at least four of the siRNAs (AD-60820, AD-60843, AD-60819, and AD-61140) that were tested showed improved suppression of ALAS1 mRNA compared with AD-58632.

### In Vivo Screen, Part II

[0960] The sequences of the siRNAs that were screened are provided in the table below.

TABLE 31
Sequences of ALAS1 siRNA Duplexes

| | | Target | | | |
|---|---|---|---|---|---|
| | SEQ | sites of | | | |
| SEQ | ID | antisense | | | |
| ID | NO: | sequence | | | |
| NO: | (anti- | on | Duplex | | |
| (sense) | sense) | NM_000688.4 | Name | Sense Sequence (5′-3′) | Antisense Sequence (5′-3′) |
| 4688 | 4689 | 873-895 | AD- | GfsasAfaGfaGfuGfUfCfuCfaUfcUfuC | asAfsgAfaGfaUfgAfgacAfcUfcUfuUfcsusg |
| | | | 58632 | fuUfL96 | |
| 4690 | 4691 | 873-895 | AD- | GfsasAfaGfaGfuGfdTCfuCfaUfc | asAfsgAfaGfaugAfgacAfcucuuucsusg |
| | | | 61141.2 | (Tgn)uCfuUfL96 | |
| 4692 | 4693 | 873-895 | AD- | GfsasAfaGfaGfuGfdTCfuCfaUfc | asAfsgAfaGfaUfgAfgAfcAfcUfcUfuUfcsusg |
| | | | 61142.2 | (Tgn)uCfuUfL96 | |
| 4694 | 4695 | 873-895 | AD- | gsasaagaGfuGfuCfucaucuucuuL96 | asAfsgAfaGfaugAfgAfcAfcucuuucsusg |
| | | | 60835 | | |
| 4696 | 4697 | 873-895 | AD- | gsasaagaGfuGfuCfucaucuucuuL96 | asAfsgAfaGfaugAfgacAfcucuuucsusg |
| | | | 60839 | | |
| 4698 | 4699 | 873-895 | AD- | gsasaagaGfuGfuCfucaucuucuuL96 | asAfsgAfaGfaUfgAfgAfcAfcUfcUfuUfcsusg |
| | | | 61143.2 | | |
| 4700 | 4701 | 873-895 | AD- | gsasaagaGfuGfdTCfucaucuucuuL96 | asAfsgAfaGfaugAfgAfcAfcucuuucsusg |
| | | | 61144.1 | | |
| 4702 | 4703 | 873-895 | AD- | gsasaagaGfuGfdTCfucaucuucuuL96 | asAfsgAfaGfaugAfgacAfcucuuucsusg |
| | | | 61145.1 | | |
| 4704 | 4705 | 873-895 | AD- | gsasaagaGfuGfdTCfucaucuucuuL96 | asAfsgAfaGfaUfgAfgAfcAfcUfcUfuUfcsusg |
| | | | 61146.1 | | |

[0961] Rats were administered a single dose of 2.5 mg/kg of siRNA. At 72 hours following administration of the siRNA, mRNA measurements of rat ALAS1 (rALAS1) mRNA and rat GAPDH (rGAPDH) mRNA were made using bDNA assay.

[0962] As is shown in FIG. 39, the siRNAs AD-61141, AD-61142, AD-60835, AD-60839, AD-61143, AD-61144, AD-61145, and AD-61146 showed improved suppression of ALAS1 mRNA compared with AD-58632. The siRNA that provided the greatest suppression in this experiment was AD-60835.

### Example 28

### In Vitro Structure Activity Relationship Studies of AD-60489

[0963] AD-60489 and siRNA derivatives of AD-60489 were generated, and some siRNAs were screened in vitro for activity. The in vitro activity of the siRNAs in suppressing ALAS1 mRNA was tested as described in Example 24. Sequences of siRNAs and results of in vitro testing are provided in the tables below.

TABLE 32
Sequences and in vitro screen results for AD-60489 and AD-60489 derivative siRNAs

| | | Target | | | | | | | |
|---|---|---|---|---|---|---|---|---|---|
| | | sites of | | | | | | | |
| | SEQ | anti- | | | | | | | |
| SEQ | ID NO: | sense | | | | | | | |
| ID NO: | (anti- | seq on | Duplex | | | Avg | SD | Avg | SD |
| (sense) | sense) | NM_000688.4 | Name* | Sense Sequence (5′-3′) | Antisense (AS) Sequence (5′-3′) | 10 nM | 10 nM | 0.1 nM | 0.1 nM |
| 4706 | 4707 | 871-893 | AD- | CfsasGfaAfaGfaGfUfGfuCfuCfaUfcUfuAfL96 | usAfsaGfaUfgAfgAfcacUfcUfuUfcUfgsgsu | 17.02 | 0.18 | 50.65 | 5.11 |
| | | | 60489.1 | | | | | | |
| 4708 | 4709 | 871-893 | AD- | CfsasGfaAfaGfaGfuGfuCfuCfaucuuAfL96 | usAfsaGfaUfgAfgAfcacUfcUfuUfcUfgsgsu | 17.13 | 5.94 | 63.58 | 18.61 |
| | | | 60495.1 | | | | | | |
| 4710 | 4711 | 871-893 | AD- | CfsasGfaAfaGfaGfuGfuCfuCfaucuuAfL96 | usAfsAfGfaUfgAfgAfcAfcUfcUfuUfcUfgsgsu | 11.90 | 0.66 | 45.19 | 8.93 |
| | | | 60501.1 | | | | | | |
| 4712 | 4713 | 871-893 | AD- | CfsasgaaaGfaGfuGfuCfuCfaucuuAfL96 | usAfsAfGfaUfgAfgAfcAfcUfcUfuUfcUfgsgsu | 14.63 | 7.85 | 48.50 | 19.55 |
| | | | 60507.1 | | | | | | |
| 4714 | 4715 | 871-893 | AD- | CfsasgaaaGfaGfuGfuCfuCfaucuuaL96 | usAfsAfGfaUfgAfgAfcAfcUfcUfuUfcUfgsgsu | 14.39 | 2.44 | 51.03 | 7.01 |
| | | | 60513.1 | | | | | | |
| 4716 | 4717 | 871-893 | AD- | csasgaaaGfaGfuGfuCfuCfaucuuaL96 | usAfsAfGfaUfgAfgAfcAfcUfcUfuUfcUfgsgsu | 14.67 | 4.88 | 51.70 | 7.72 |
| | | | 60519.1 | | | | | | |
| 4718 | 4719 | 871-893 | AD- | csasgaaaGfaGfuguCfuCfaucuuaL96 | usAfsAfGfaUfgAfgAfcAfcUfcUfuUfcUfgsgsu | 45.24 | 18.16 | 105.09 | 14.17 |
| | | | 60525.1 | | | | | | |
| 4720 | 4721 | 871-893 | AD- | csasgaaaGfaGfugucuCfaucuuaL96 | usAfsAfGfaUfgAfgAfcAfcUfcUfuUfcUfgsgsu | 62.19 | 12.47 | 107.18 | 1.37 |
| | | | 60531.1 | | | | | | |
| 4722 | 4723 | 871-893 | AD- | csasgaaaGfaGfugucucaucuuaL96 | usAfsAfGfaUfgAfgAfcAfcUfcUfuUfcUfgsgsu | 39.06 | 10.92 | 82.70 | 10.67 |
| | | | 60490.1 | | | | | | |
| 4724 | 4725 | 871-893 | AD- | csasgaaaGfaGfugucucaucuuaL96 | usAfsAfGfaUfgAfgAfcAfcUfcUfuUfcugsgsu | 48.90 | 1.85 | 71.55 | 5.47 |
| | | | 60496.1 | | | | | | |
| 4726 | 4727 | 871-893 | AD- | csasgaaaGfaGfugucucaucuuaL96 | usAfsAfGfaUfgAfgAfcAfcUfcUfuucugsgsu | 51.83 | 12.62 | 81.85 | 4.25 |
| | | | 60502.1 | | | | | | |
| 4728 | 4729 | 871-893 | AD- | csasgaaaGfaGfugucucaucuuaL96 | usAfsAfGfaUfgAfgAfcAfcUfcuuucugsgsu | 65.34 | 21.75 | 89.23 | 11.08 |
| | | | 60508.1 | | | | | | |
| 4730 | 4731 | 871-893 | AD- | csasgaaaGfaGfugucucaucuuaL96 | usAfsAfGfaUfgAfgAfcAfcucuuucugsgsu | 97.13 | 3.47 | 102.94 | 7.36 |
| | | | 60514.1 | | | | | | |
| 4732 | 4733 | 871-893 | AD- | csasgaaaGfaGfugucucaucuuaL96 | usAfsAfGfaugAfgAfcAfcucuuucugsgsu | 104.97 | 0.93 | 126.75 | 20.47 |
| | | | 60520.1 | | | | | | |
| 4734 | 4735 | 871-893 | AD- | csasgaaaGfAfGfugucucaucuuaL96 | usAfsAfGfaugAfgAfcAfcucuuucugsgsu | 61.48 | 15.44 | 81.28 | 7.99 |
| | | | 60526.1 | | | | | | |
| 4736 | 4737 | 871-893 | AD- | csasgaaaGfAfGfugucucaucuuaL96 | usAfsAfGfaugAfgAfcAfcdTcuuucugsgsu | 83.47 | 13.36 | 94.13 | 8.11 |
| | | | 60532.1 | | | | | | |
| 4738 | 4739 | 871-893 | AD- | csasgaAfaGfAfGfugucucaucuuaL96 | usAfsAfGfaugAfgAfcAfcdTcuuucugsgsu | 109.05 | 0.43 | 97.85 | 9.77 |
| | | | 60491.1 | | | | | | |
| 4740 | 4741 | 871-893 | AD- | CfsasgaAfaGfAfGfugucucaucuuaL96 | usAfsAfGfaugAfgAfcAfcdTcuuucugsgsu | 73.81 | 10.17 | 95.01 | 5.40 |
| | | | 60497.1 | | | | | | |
| 4742 | 4743 | 871-893 | AD- | csasgaaaGfAfGfudGucucaucuuaL96 | usAfsAfGfaugAfgAfcAfcdTcuuucugsgsu | 75.30 | 11.29 | 96.03 | 6.30 |
| | | | 60503.1 | | | | | | |
| 4744 | 4745 | 871-893 | AD- | csasgaaaGfAfGfugudCucaucuuaL96 | usAfsAfGfaugAfgAfcAfcdTcuuucugsgsu | 71.37 | 24.41 | 104.36 | 18.62 |
| | | | 60509.1 | | | | | | |
| 4746 | 4747 | 871-893 | AD- | csasgaaaGfAfGfugucudCaucuuaL96 | usAfsAfGfaugAfgAfcAfcdTcuuucugsgsu | 64.16 | 13.95 | 98.80 | 0.92 |
| | | | 60515.1 | | | | | | |
| 4748 | 4749 | 871-893 | AD- | csasgaaaGfAfGfugucucadTcuuaL96 | usAfsAfGfaugAfgAfcAfcdTcuuucugsgsu | 73.99 | 36.39 | 99.96 | 7.29 |
| | | | 60521.1 | | | | | | |
| 4750 | 4751 | 871-893 | AD- | csasgaaaGfAfGfugucucaucdTuaL96 | usAfsAfGfaugAfgAfcAfcdTcuuucugsgsu | 82.69 | 26.56 | 114.13 | 4.81 |
| | | | 60527.1 | | | | | | |
| 4752 | 4753 | 871-893 | AD- | csasgaaaGfAfGfudGudCucaucuuaL96 | usAfsAfGfaugAfgAfcAfcdTcuuucugsgsu | 89.41 | 4.69 | 107.40 | 9.67 |
| | | | 60533.1 | | | | | | |
| 4754 | 4755 | 871-893 | AD- | csasgaaaGfAfGfudGucudCaucuuaL96 | usAfsAfGfaugAfgAfcAfcdTcuuucugsgsu | 83.52 | 1.56 | 100.70 | 0.79 |
| | | | 60492.1 | | | | | | |
| 4756 | 4757 | 871-893 | AD- | csasgaaaGfAfGfudGucucadTcuuaL96 | usAfsAfGfaugAfgAfcAfcdTcuuucugsgsu | 64.64 | 16.21 | 98.41 | 19.60 |
| | | | 60498.1 | | | | | | |
| 4758 | 4759 | 871-893 | AD- | csasgaaaGfAfGfudGudCucadTcuuaL96 | usAfsAfGfaugAfgAfcAfcdTcuuucugsgsu | 57.55 | 5.13 | 93.14 | 0.41 |
| | | | 60504.1 | | | | | | |
| 4760 | 4761 | 871-893 | AD- | csasgaaaGfAfGfudGudCudCadTcuuaL96 | usAfsAfGfaugAfgAfcAfcdTcuuucugsgsu | 58.88 | 25.48 | 91.39 | 2.06 |
| | | | 60510.1 | | | | | | |
| 4762 | 4763 | 871-893 | AD- | csasgaaaGfAfGfugucucaucuuaL96 | usAfsAfGfadTgAfgAfcAfcdTcuuucugsgsu | 53.24 | 6.56 | 84.40 | 2.73 |
| | | | 60516.1 | | | | | | |
| 4764 | 4765 | 871-893 | AD- | csasgaAfaGfAfGfugucucaucuuaL96 | usAfsAfGfadTgAfgAfcAfcdTcuuucugsgsu | 67.17 | 6.48 | 91.62 | 5.43 |
| | | | 60522.1 | | | | | | |
| 4766 | 4767 | 871-893 | AD- | CfsasgaAfaGfAfGfugucucaucuuaL96 | usAfsAfGfadTgAfgAfcAfcdTcuuucugsgsu | 81.44 | 37.04 | 89.71 | 8.60 |
| | | | 60528.1 | | | | | | |
| 4768 | 4769 | 871-893 | AD- | csasgaaaGfAfGfugucucaucuuaL96 | usAfsAfGfaugAfgAfcAfcdTcdTuucugsgsu | 62.63 | 20.55 | 99.62 | 7.37 |
| | | | 60534.1 | | | | | | |
| 4770 | 4771 | 871-893 | AD- | csasgaaaGfAfGfugucucaucuuaL96 | usAfsAfGfaugAfgAfcAfcdTcuudTcugsgsu | 107.18 | 0.11 | 87.98 | 2.41 |
| | | | 60493.1 | | | | | | |
| 4772 | 4773 | 871-893 | AD- | csasgaaaGfAfGfugucucaucuuaL96 | usAfsAfGfadTgAfgAfcAfcdTcuudTcugsgsu | 35.92 | 13.78 | 77.52 | 6.68 |
| | | | 60499.1 | | | | | | |
| 4774 | 4775 | 871-893 | AD- | csasgaaaGfAfGfugucucaucuuaL96 | usAfsAfGfaugAfgAfcAfc(Tgn)cuuucugsgsu | 66.77 | 16.45 | 109.82 | 2.48 |
| | | | 60505.1 | | | | | | |
| 4776 | 4777 | 871-893 | AD- | csasgaAfaGfAfGfugucucaucuuaL96 | usAfsAfGfaugAfgAfcAfc(Tgn)cuuucugsgsu | 82.10 | 10.11 | 95.50 | 14.73 |
| | | | 60511.1 | | | | | | |
| 4778 | 4779 | 871-893 | AD- | CfsasgaAfaGfAfGfugucucaucuuaL96 | usAfsAfGfaugAfgAfcAfc(Tgn)cuuucugsgsu | 80.83 | 29.69 | 93.57 | 18.41 |
| | | | 60517.1 | | | | | | |
| 4780 | 4781 | 871-893 | AD- | GfsasGfaAfaGfaGfUfGfuCfuCfaUfcUfuAfL96 | usAfsaGfaUfgAfgAfcacUfcUfuUfcUfcscsa | 29.60 | 1.64 | 67.16 | 8.40 |
| | | | 60523.1 | | | | | | |
| 4782 | 4783 | 871-893 | AD- | GfsusGfaAfaGfaGfUfGfuCfuCfaUfcUfuAfL96 | usAfsaGfaUfgAfgAfcacUfcUfuUfcAfcscsa | 21.15 | 1.21 | 79.02 | 28.99 |
| | | | 60529.1 | | | | | | |
| 4784 | 4785 | 871-893 | AD- | GfsusCfaAfaGfaGfUfGfuCfuCfaUfcUfuAfL96 | usAfsaGfaUfgAfgAfcacUfcUfuUfgAfcscsa | 31.78 | 13.54 | 79.36 | 26.56 |
| | | | 60535.1 | | | | | | |
| 4786 | 4787 | 871-893 | AD- | GfsusCfaAfaGfaGfUfGfuCfuCfaUfcUfuAfL96 | usAfsaGfaUfgAfgAfcacUfcUfuUfgAfcsgsu | 30.14 | 3.42 | 81.46 | 12.88 |
| | | | 60494.1 | | | | | | |
| 4788 | 4789 | 871-893 | AD- | CfsusCfuAfaGfaGfUfGfuCfuCfaUfcUfuAfL96 | usAfsaGfaUfgAfgAfcacUfcUfuAfgAfgsgsu | 29.85 | 11.78 | 72.14 | 4.56 |
| | | | 60500.1 | | | | | | |
| 4790 | 4791 | 871-893 | AD- | CfsusCfuUfaGfaGfUfGfuCfuCfaUfcUfuAfL96 | usAfsaGfaUfgAfgAfcacUfcUfaAfgUfgsgsu | 19.06 | 1.98 | 88.93 | 11.13 |
| | | | 60506.1 | | | | | | |
| 4792 | 4793 | 871-893 | AD- | CfsusGfuUfuGfaGfUfGfuCfuCfaUfcUfuAfL96 | usAfsaGfaUfgAfgAfcacUfcAfaAfcUfgsgsu | 29.71 | 1.79 | 86.32 | 17.69 |
| | | | 60512.1 | | | | | | |
| 4794 | 4795 | 871-893 | AD- | CfsasGfaAfaGfaGfUfGfuCfuCfaUfcUfuAfL96 | (Tgns)AfsaGfaUfgAfgAfcacUfcUfuUfcUfgsgsu | 27.47 | 2.59 | 81.03 | 10.93 |
| | | | 60518.1 | | | | | | |
| 4796 | 4797 | 871-893 | AD- | CfsasGfaAfaGfaGfUfGfuCfuCfaUfcUfuAfL96 | usAfs(Agn)GfaUfgAfgAfcacUfcUfuUfcUfgsgsu | 17.02 | 1.39 | 71.65 | 17.42 |
| | | | 60524.1 | | | | | | |
| 4798 | 4799 | 871-893 | n/a | CfsasGfaAfaGfaGfUfGfuCfuCfaUfcUfuAfL96 | usAfsa(Ggn)aUfgAfgAfcacUfcUfuUfcUfgsgsu | | | | |
| 4800 | 4801 | 871-893 | AD- | CfsasGfaAfaGfaGfUfGfuCfuCfaUfcUfuAfL96 | usAfsaGf(Agn)aUfgAfgAfcacUfcUfuUfcUfgsgsu | 61.77 | 10.19 | 91.55 | 2.20 |
| | | | 60536.1 | | | | | | |
| 4802 | 4803 | 871-893 | AD- | CfsasGfaAfaGfaGfUfGfuCfuCfaUfcUfuAfL96 | usAfsaGfa(Tgn)gAfgAfcacUfcUfuUfcUfgsgsu | 25.47 | 2.83 | 54.36 | 15.02 |
| | | | 60541.1 | | | | | | |
| 4804 | 4805 | 871-893 | AD- | CfsasGfaAfaGfaGfUfGfuCfuCfaUfcUfuAfL96 | usAfsaGfaUf(Ggn)AfgAfcacUfcUfuUfcUfgsgsu | 49.32 | 1.50 | 90.79 | 11.36 |
| | | | 60546.1 | | | | | | |
| 4806 | 4807 | 871-893 | AD- | CfsasGfaAfaGfaGfUfGfuCfuCfaUfcUfuAfL96 | usAfsaGfaUfg(Agn)gAfcacUfcUfuUfcUfgsgsu | 24.37 | 1.11 | 76.80 | 24.99 |
| | | | 60551.1 | | | | | | |
| 4808 | 4809 | 871-893 | AD- | CfsasGfaAfaGfaGfUfGfuCfuCfaUfcUfuAfL96 | usAfsaGfaUfgAf(Ggn)AfcacUfcUfuUfcUfgsgsu | 21.43 | 4.71 | 61.90 | 5.64 |
| | | | 60556.1 | | | | | | |
| 4810 | 4811 | 871-893 | AD- | CfsasGfaAfaGfaGfUfGfuCfuCfaUfcUfuAfL96 | usAfsaGfaUfgAfg(Agn)cacUfcUfuUfcUfgsgsu | 28.25 | 6.41 | 71.84 | 27.01 |
| | | | 60561.1 | | | | | | |
| 4812 | 4813 | 871-893 | AD- | CfsasGfaAfaGfaGfUfGfuCfuCfaUfcUfuAfL96 | usAfsaGfaUfgAfgAf(Cgn)acUfcUfuUfcUfgsgsu | 27.57 | 4.87 | 67.91 | 18.28 |
| | | | 60566.1 | | | | | | |
| 4814 | 4815 | 871-893 | AD- | CfsasGfaAfaGfaGfUfGfuCfuCfaUfcUfuAfL96 | usAfsaGfaUfgAfgAfc(Agn)cUfcUfuUfcUfgsgsu | 24.11 | 0.04 | 58.75 | 21.02 |
| | | | 60570.1 | | | | | | |
| 4816 | 4817 | 871-893 | AD- | CfsasGfaAfaGfaGfUfGfuCfuCfaUfcUfu(Agn)L96 | asAfsgAfaGfaUfgAfgacAfcUfcUfuUfcsusg | 15.32 | 4.78 | 42.01 | 9.51 |
| | | | 60583.1 | | | | | | |
| 4818 | 4819 | 871-893 | AD- | CfsasGfaAfaGfaGfUfGfuCfuCfaUfcUf(Tgn)AfL96 | asAfsgAfaGfaUfgAfgacAfcUfcUfuUfcsusg | 21.15 | 4.14 | 49.54 | 13.34 |
| | | | 60585.1 | | | | | | |
| 4820 | 4821 | 871-893 | AD- | CfsasGfaAfaGfaGfUfGfuCfuCfaUfc(Tgn)uAfL96 | asAfsgAfaGfaUfgAfgacAfcUfcUfuUfcsusg | 14.66 | 1.73 | 41.47 | 13.20 |
| | | | 60587.1 | | | | | | |
| 4822 | 4823 | 871-893 | AD- | CfsasGfaAfaGfaGfUfGfuCfuCfaUf(Cgn)UfuAfL96 | asAfsgAfaGfaUfgAfgacAfcUfcUfuUfcsusg | 20.77 | 5.12 | 43.97 | 15.63 |
| | | | 60589.1 | | | | | | |
| 4824 | 4825 | 871-893 | AD- | CfsasGfaAfaGfaGfUfGfuCfuCfa(Tgn)cUfuAfL96 | asAfsgAfaGfaUfgAfgacAfcUfcUfuUfcsusg | 13.66 | 0.05 | 36.42 | 16.94 |
| | | | 60591.1 | | | | | | |
| 4826 | 4827 | 871-893 | AD- | CfsasGfaAfaGfaGfUfGfuCfuCf(Agn)UfcUfuAfL96 | asAfsgAfaGfaUfgAfgacAfcUfcUfuUfcsusg | 13.35 | 4.11 | 35.43 | 11.36 |
| | | | 60592.1 | | | | | | |
| 4828 | 4829 | 871-893 | AD- | CfsasGfaAfaGfaGfUfGfuCfu(Cgn)aUfcUfuAfL96 | asAfsgAfaGfaUfgAfgacAfcUfcUfuUfcsusg | 15.13 | 0.28 | 39.99 | 19.39 |
| | | | 60593.1 | | | | | | |
| 4830 | 4831 | 871-893 | AD- | CfsasGfaAfaGfaGfUfGfuCf(Tgn)CfaUfcUfuAfL96 | asAfsgAfaGfaUfgAfgacAfcUfcUfuUfcsusg | 19.56 | 8.17 | 51.59 | 1.11 |
| | | | 60582.1 | | | | | | |
| 4832 | 4833 | 871-893 | AD- | CfsasGfaAfaGfaGfUfGfu(Cgn)uCfaUfcUfuAfL96 | asAfsgAfaGfaUfgAfgacAfcUfcUfuUfcsusg | 23.36 | 6.63 | 58.79 | 10.35 |
| | | | 60584.1 | | | | | | |
| 4834 | 4835 | 871-893 | AD- | CfsasGfaAfaGfaGfUfGf(Tgn)CfuCfaUfcUfuAfL96 | asAfsgAfaGfaUfgAfgacAfcUfcUfuUfcsusg | 27.78 | 2.20 | 76.86 | 6.81 |
| | | | 60586.1 | | | | | | |
| 4836 | 4837 | 871-893 | AD- | CfsasGfaAfaGfaGfUf(Ggn)uCfuCfaUfcUfuAfL96 | asAfsgAfaGfaUfgAfgacAfcUfcUfuUfcsusg | 105.27 | 14.25 | 99.26 | 19.62 |
| | | | 60588.1 | | | | | | |
| 4838 | 4839 | 871-893 | AD- | CfsasGfaAfaGfaGf(Tgn)GfuCfuCfaUfcUfuAfL96 | asAfsgAfaGfaUfgAfgacAfcUfcUfuUfcsusg | 28.74 | 1.66 | 81.88 | 22.04 |
| | | | 60590.1 | | | | | | |
| 4840 | 4841 | 871-893 | AD- | CfsasGfaAfaGfaGfUfGfuCfuCfaUfc(Tgn)uAfL96 | usAfs(Agn)GfaUfgAfgAfcacUfcUfuUfcUfgsgsu | 22.74 | 14.85 | 60.42 | 19.38 |
| | | | 60558.1 | | | | | | |
| 4842 | 4843 | 871-893 | n/a | CfsasGfaAfaGfaGfUfGfuCfuCfaUf(Cgn)UfuAfL96 | usAfsa(Ggn)aUfgAfgAfcacUfcUfuUfcUfgsgsu | | | | |
| 4844 | 4845 | 871-893 | AD- | CfsasGfaAfaGfaGfUfGfuCfuCfa(Tgn)cUfuAfL96 | usAfsaGf(Agn)aUfgAfgAfcacUfcUfuUfcUfgsgsu | 86.66 | 21.93 | 110.05 | 16.44 |
| | | | 60568.1 | | | | | | |
| 4846 | 4847 | 871-893 | AD- | CfsasGfaAfaGfaGfUfGfuCfuCf(Agn)UfcUfuAfL96 | usAfsaGfa(Tgn)gAfgAfcacUfcUfuUfcUfgsgsu | 22.37 | 4.86 | 71.24 | 22.19 |
| | | | 60572.1 | | | | | | |
| 4848 | 4849 | 871-893 | AD- | CfsasGfaAfaGfaGfUfGfuCfu(Cgn)aUfcUfuAfL96 | usAfsaGfaUf(Ggn)AfgAfcacUfcUfuUfcUfgsgsu | 43.35 | 14.53 | 104.44 | 2.51 |
| | | | 60539.1 | | | | | | |
| 4850 | 4851 | 871-893 | AD- | CfsasGfaAfaGfaGfUfGfuCf(Tgn)CfaUfcUfuAfL96 | usAfsaGfaUfg(Agn)gAfcacUfcUfuUfcUfgsgsu | 25.85 | 1.18 | 69.98 | 5.86 |
| | | | 60544.1 | | | | | | |
| 4852 | 4853 | 871-893 | AD- | CfsasGfaAfaGfaGfUfGfu(Cgn)uCfaUfcUfuAfL96 | usAfsaGfaUfgAf(Ggn)AfcacUfcUfuUfcUfgsgsu | 29.40 | 4.62 | 72.98 | 20.16 |
| | | | 60549.1 | | | | | | |
| 4854 | 4855 | 871-893 | AD- | CfsasGfaAfaGfaGfUfGf(Tgn)CfuCfaUfcUfuAfL96 | usAfsaGfaUfgAfg(Agn)cacUfcUfuUfcUfgsgsu | 33.74 | 0.45 | 75.36 | 19.39 |
| | | | 60554.1 | | | | | | |
| 4856 | 4857 | 871-893 | n/a | CfsasGfaAfaGfaGfUf(Ggn)uCfuCfaUfcUfuAfL96 | usAfsaGfaUfgAfgAf(Cgn)acUfcUfuUfcUfgsgsu | | | | |
| 4858 | 4859 | 871-893 | AD- | CfsasGfaAfaGfaGf(Tgn)GfuCfuCfaUfcUfuAfL96 | usAfsaGfaUfgAfgAfc(Agn)cUfcUfuUfcUfgsgsu | 27.77 | 10.34 | 77.01 | 11.51 |
| | | | 60564.1 | | | | | | |
| 4860 | 4861 | 871-893 | AD- | CfsasGfaAfaGfaGfUfGfuCfuCfaUfcUfuAfsL96 | usAfsaGfaUfgAfgAfcacUfcUfuUfcUfgsgsu | 20.34 | 5.29 | 59.40 | 19.74 |
| | | | 60569.1 | | | | | | |
| 4862 | 4863 | 871-893 | AD- | CfsasGfaAfaGfaGfUfGfuCfuCfaUfscUfsuAfsL96 | usAfsaGfaUfgAfgAfcacUfcUfuUfcUfgsgsu | 20.07 | 3.83 | 60.80 | 14.93 |
| | | | 60573.1 | | | | | | |
| 4864 | 4865 | 871-893 | AD- | CfsasGfaAfaGfaGfUfGfuCfuCfaUfcUfuAfsL96 | usAfsaGfaUfsgAfgAfcacUfcUfsuUfscUfgsgsu | 24.36 | 0.56 | 75.75 | 14.97 |
| | | | 60540.1 | | | | | | |
| 4866 | 4867 | 871-893 | n/a | CfsasGfaAfaGfaGfUfGfuCfuCfaUfscUfsuAfsL96 | usAfsaGfaUfsgAfgAfcacUfcUfsuUfscUfgsgsu | | | | |

[0964] In the in vitro screen for which the results are shown in the table above, the siRNAs that provided the greatest ALAS1 mRNA suppression (greater than 80% suppression, such that less than 20% mRNA was remaining) at 10 nM concentration included AD-60501, AD-60592, AD-60591, AD-60513, AD-60507, AD-60587, AD-60519, AD-60593, AD-60583, AD-60524, AD-60489, AD-60495, AD-60506, and AD-60582.

[0965] In the in vitro screen for which the results are shown in the table above, the siRNAs that provided the greatest ALAS1 mRNA suppression (greater than 30% suppression, such that less than 70% mRNA was remaining) at 0.1 nM concentration included AD-60592, AD-60591, AD-60593, AD-60587, AD-60583, AD-60589, AD-60501, AD-60507, AD-60585, AD-60489, AD-60513, AD-60582, AD-60519, AD-60541, AD-60570, AD-60584, AD-60569, AD-60558, AD-60573, AD-60556, AD-60495, AD-60523, AD-60566, and AD-60544.

[0966] As is shown in the table below, testing of further siRNAs revealed that the following duplexes provided greater than 80% suppression at 10 nM concentration: AD-60489, AD-60495, AD-60501, AD-60507, AD-60513, AD-60519, AD-60583, AD-60591, AD-60592, and AD-60593, and the following duplexes provided greater than 30% suppression at 0.1 nM concentration: AD-60489, AD-60495, AD-60501, AD-60507, AD-60513, AD-60519, AD-60583, AD-60591, AD-60592, and AD-60593.

TABLE 33
Sequences and in vitro screen results for AD-60489 and AD-60489 derivative siRNAs

| | SEQ | | | | | | | | |
|---|---|---|---|---|---|---|---|---|---|
| | ID | Target sites | | | | | | | |
| SEQ | NO: | of anti-sense | | | | | | | |
| ID NO: | (anti- | seq on | Duplex | | | Avg | SD | Avg | SD |
| (sense) | sense) | NM_000688.4 | Name | Sense Sequence (5′-3′) | Antisense (AS) Sequence (5′-3′) | 10 nM | 10 nM | 0.1 nM | 0.1 nM |
| 4868 | 4869 | 871-893 | AD- | CfsasGfaAfaGfaGfUfGfuCfuCfaUfcUfuAfL96 | usAfsaGfaUfgAfgAfcacUfcUfuUfcUfgsgsu | 17.0 | 0.2 | 50.7 | 5.1 |
| | | | 60489.1 | | | | | | |
| 4870 | 4871 | 871-893 | AD- | CfsasGfaAfaGfaGfuGfuCfuCfaucuuAfL96 | usAfsaGfaUfgAfgAfcacUfcUfuUfcUfgsgsu | 17.1 | 5.9 | 63.6 | 18.6 |
| | | | 60495.1 | | | | | | |
| 4872 | 4873 | 871-893 | AD- | CfsasGfaAfaGfaGfuGfuCfuCfaucuuAfL96 | usAfsAfGfaUfgAfgAfcAfcUfcUfuUfcUfgsgsu | 11.9 | 0.7 | 45.2 | 8.9 |
| | | | 60501.1 | | | | | | |
| 4874 | 4875 | 871-893 | | CfsasGfaAfaGfaGfuGfuCfuCfaucuuAfL96 | usAfsAfGfaugAfgAfcAfcucuuucugsgsu | | | | |
| 4876 | 4877 | 871-893 | | CfsasGfaAfaGfaGfuGfuCfuCfaucuuAfL96 | usAfsAfGfadTgAfgAfcAfcdTcuudTcugsgsu | | | | |
| 4878 | 4879 | 871-893 | | CfsasGfaAfaGfaGfuGfuCfuCfaucuuAfL96 | usAfsaGfadTgAfgAfcAfcdTcuudTcugsgsu | | | | |
| 4880 | 4881 | 871-893 | | CfsasGfaAfaGfaGfuGfuCfuCfaucuuAfL96 | usAfsAfGfadTgAfgAfcacdTcuudTcugsgsu | | | | |
| 4882 | 4883 | 871-893 | AD- | CfsasgaaaGfaGfuGfuCfuCfaucuuAfL96 | usAfsAfGfaUfgAfgAfcAfcUfcUfuUfcUfgsgsu | 14.6 | 7.8 | 48.5 | 19.6 |
| | | | 60507.1 | | | | | | |
| 4884 | 4885 | 871-893 | | CfsasgaaaGfaGfuGfuCfuCfaucuuAfL96 | usAfsaGfaUfgAfgAfcacUfcUfuUfcUfgsgsu | | | | |
| 4886 | 4887 | 871-893 | | CfsasgaaaGfaGfuGfuCfuCfaucuuAfL96 | usAfsAfGfaugAfgAfcAfcucuuucugsgsu | | | | |
| 4888 | 4889 | 871-893 | | CfsasgaaaGfaGfuGfuCfuCfaucuuAfL96 | usAfsAfGfadTgAfgAfcAfcdTcuudTcugsgsu | | | | |
| 4890 | 4891 | 871-893 | | CfsasgaaaGfaGfuGfuCfuCfaucuuAfL96 | usAfsaGfadTgAfgAfcAfcdTcuudTcugsgsu | | | | |
| 4892 | 4893 | 871-893 | | CfsasgaaaGfaGfuGfuCfuCfaucuuAfL96 | usAfsAfGfadTgAfgAfcacdTcuudTcugsgsu | | | | |
| 4894 | 4895 | 871-893 | AD- | CfsasgaaaGfaGfuGfuCfuCfaucuuaL96 | usAfsAfGfaUfgAfgAfcAfcUfcUfuUfcUfgsgsu | 14.4 | 2.4 | 51.0 | 7.0 |
| | | | 60513.1 | | | | | | |
| 4896 | 4897 | 871-893 | | CfsasgaaaGfaGfuGfuCfuCfaucuuaL96 | usAfsaGfaUfgAfgAfcacUfcUfuUfcUfgsgsu | | | | |
| 4898 | 4899 | 871-893 | | CfsasgaaaGfaGfuGfuCfuCfaucuuaL96 | usAfsAfGfaugAfgAfcAfcucuuucugsgsu | | | | |
| 4900 | 4901 | 871-893 | | CfsasgaaaGfaGfuGfuCfuCfaucuuaL96 | usAfsAfGfadTgAfgAfcAfcdTcuudTcugsgsu | | | | |
| 4902 | 4903 | 871-893 | | CfsasgaaaGfaGfuGfuCfuCfaucuuaL96 | usAfsaGfadTgAfgAfcAfcdTcuudTcugsgsu | | | | |
| 4904 | 4905 | 871-893 | | CfsasgaaaGfaGfuGfuCfuCfaucuuaL96 | usAfsAfGfadTgAfgAfcacdTcuudTcugsgsu | | | | |
| 4906 | 4907 | 871-893 | AD- | csasgaaaGfaGfuGfuCfuCfaucuuaL96 | usAfsAfGfaUfgAfgAfcAfcUfcUfuUfcUfgsgsu | 14.7 | 4.9 | 51.7 | 7.7 |
| | | | 60519.1 | | | | | | |
| 4908 | 4909 | 871-893 | | csasgaaaGfaGfuGfuCfuCfaucuuaL96 | usAfsaGfaUfgAfgAfcacUfcUfuUfcUfgsgsu | | | | |
| 4910 | 4911 | 871-893 | | csasgaaaGfaGfuGfuCfuCfaucuuaL96 | usAfsAfGfaugAfgAfcAfcucuuucugsgsu | | | | |
| 4912 | 4913 | 871-893 | | csasgaaaGfaGfuGfuCfuCfaucuuaL96 | usAfsAfGfadTgAfgAfcAfcdTcuudTcugsgsu | | | | |
| 4914 | 4915 | 871-893 | | csasgaaaGfaGfuGfuCfuCfaucuuaL96 | usAfsaGfadTgAfgAfcAfcdTcuudTcugsgsu | | | | |
| 4916 | 4917 | 871-893 | | csasgaaaGfaGfuGfuCfuCfaucuuaL96 | usAfsAfGfadTgAfgAfcacdTcuudTcugsgsu | | | | |
| 4918 | 4919 | 871-893 | AD- | csasgaaaGfAfGfugucucaucuuaL96 | usAfsAfGfadTgAfgAfcAfcdTcuudTcugsgsu | 35.9 | 13.8 | 77.5 | 6.7 |
| | | | 60499.1 | | | | | | |
| 4920 | 4921 | 871-893 | | csasgaaaGfAfGfugucucaucuuaL96 | usAfsaGfaUfgAfgAfcacUfcUfuUfcUfgsgsu | | | | |
| 4922 | 4923 | 871-893 | | csasgaaaGfAfGfugucucaucuuaL96 | usAfsAfGfaUfgAfgAfcAfcUfcUfuUfcUfgsgsu | | | | |
| 4924 | 4925 | 871-893 | | csasgaaaGfAfGfugucucaucuuaL96 | usAfsAfGfaugAfgAfcAfcucuuucugsgsu | | | | |
| 4926 | 4927 | 871-893 | | csasgaaaGfAfGfugucucaucuuaL96 | usAfsaGfadTgAfgAfcAfcdTcuudTcugsgsu | | | | |
| 4928 | 4929 | 871-893 | | csasgaaaGfAfGfugucucaucuuaL96 | usAfsAfGfadTgAfgAfcacdTcuudTcugsgsu | | | | |
| 4930 | 4931 | 871-893 | | csasgaaaGfAfGfugucuca(Tgn)cuuaL96 | usAfsaGfaUfgAfgAfcacUfcUfuUfcUfgsgsu | | | | |
| 4932 | 4933 | 871-893 | | csasgaaaGfAfGfugucuca(Tgn)cuuaL96 | usAfsAfGfaUfgAfgAfcAfcUfcUfuUfcUfgsgsu | | | | |
| 4934 | 4935 | 871-893 | | csasgaaaGfAfGfugucuca(Tgn)cuuaL96 | usAfsAfGfaugAfgAfcAfcucuuucugsgsu | | | | |
| 4936 | 4937 | 871-893 | | csasgaaaGfAfGfugucuca(Tgn)cuuaL96 | usAfsAfGfadTgAfgAfcAfcdTcuudTcugsgsu | | | | |
| 4938 | 4939 | 871-893 | | csasgaaaGfAfGfugucuca(Tgn)cuuaL96 | usAfsaGfadTgAfgAfcAfcdTcuudTcugsgsu | | | | |
| 4940 | 4941 | 871-893 | | csasgaaaGfAfGfugucuca(Tgn)cuuaL96 | usAfsAfGfadTgAfgAfcacdTcuudTcugsgsu | | | | |
| 4942 | 4943 | 871-893 | AD- | CfsasGfaAfaGfaGfUfGfuCfuCfaUfcUfu(Agn)L96 | asAfsgAfaGfaUfgAfgacAfcUfcUfuUfcsusg | 15.3 | 4.8 | 42.0 | 9.5 |
| | | | 60583.1 | | | | | | |
| 4944 | 4945 | 871-893 | AD- | CfsasGfaAfaGfaGfUfGfuCfuCfa(Tgn)cUfuAfL96 | asAfsgAfaGfaUfgAfgacAfcUfcUfuUfcsusg | 13.7 | 0.0 | 36.4 | 16.9 |
| | | | 60591.1 | | | | | | |
| 4946 | 4947 | 871-893 | AD- | CfsasGfaAfaGfaGfUfGfuCfuCf(Agn)UfcUfuAfL96 | asAfsgAfaGfaUfgAfgacAfcUfcUfuUfcsusg | 13.4 | 4.1 | 35.4 | 11.4 |
| | | | 60592.1 | | | | | | |
| 4948 | 4949 | 871-893 | AD- | CfsasGfaAfaGfaGfUfGfuCfu(Cgn)aUfcUfuAfL96 | asAfsgAfaGfaUfgAfgacAfcUfcUfuUfcsusg | 15.1 | 0.3 | 40.0 | 19.4 |
| | | | 60593.1 | | | | | | |
| 4950 | 4951 | 871-893 | AD- | CfsasGfaAfaGfaGfUfGfuCfuCfaUfcUfuAfL96 | usAfsaGfaUfgAfgAfcacUfcUfuUfcUfgsgsu | 17.0 | 0.2 | 50.7 | 5.1 |
| | | | 60489.1 | | | | | | |
| 4952 | 4953 | 871-893 | | CfsasGfaAfaGfaGfdTGfuCfuCfaUfcUfuAfL96 | usAfsaGfaUfgAfgAfcacUfcUfuUfcUfgsgsu | | | | |
| 4954 | 4955 | 871-893 | | CfsasGfaAfaGfaGfUfGfuCfuCfaUfcUfuAfL96 | usAfsaGfaUfgAfgAfcacUfcdTuUfcUfgsgsu | | | | |
| 4956 | 4957 | 871-893 | | CfsasGfaAfaGfaGfdTGfuCfuCfaUfcUfuAfL96 | usAfsaGfaUfgAfgAfcacUfcdTuUfcUfgsgsu | | | | |
| 4958 | 4959 | 871-893 | | CfsasGfaAfaGfaGfdTGfuCfuCfaUfscUfsuAfsL96 | usAfsaGfaUfgAfgAfcacUfcdTuUfcUfgsgsu | | | | |
| 4960 | 4961 | 871-893 | | CfsasGfaAfaGfaGfdTGfuCfuCfaUfscusuAfsL96 | usAfsAfGfaUfgAfgAfcacUfcdTuUfcUfgsgsu | | | | |
| 4962 | 4963 | 871-893 | AD- | CfsasGfaAfaGfaGfUfGfuCfuCfa(Tgn)cUfuAfL96 | asAfsgAfaGfaUfgAfgacAfcUfcUfuUfcsusg | 13.7 | 0.0 | 36.4 | 16.9 |
| | | | 60591.1 | | | | | | |
| 4964 | 4965 | 871-893 | | CfsasGfaAfaGfaGfdTGfuCfuCfa(Tgn)cUfuAfL96 | asAfsgAfaGfaUfgAfgacAfcUfcUfuUfcsusg | | | | |
| 4966 | 4967 | 871-893 | | CfsasGfaAfaGfaGfUfGfuCfuCfa(Tgn)cUfuAfL96 | usAfsaGfaUfgAfgAfcacUfcdTuUfcUfgsgsu | | | | |
| 4968 | 4969 | 871-893 | | CfsasGfaAfaGfaGfdTGfuCfuCfa(Tgn)cUfuAfL96 | usAfsaGfaUfgAfgAfcacUfcdTuUfcUfgsgsu | | | | |
| 4970 | 4971 | 871-893 | | CfsasGfaAfaGfaGfdTGfuCfuCfa(Tgn)scUfsuAfsL96 | usAfsaGfaUfgAfgAfcacUfcdTuUfcUfgsgsu | | | | |
| 4972 | 4973 | 871-893 | | CfsasGfaAfaGfaGfdTGfuCfuCfa(Tgn)scusuAfsL96 | usAfsAfGfaUfgAfgAfcacUfcdTuUfcUfgsgsu | | | | |
| 4974 | 4975 | 871-893 | AD- | CfsasGfaAfaGfaGfUfGfuCfuCf(Agn)UfcUfuAfL96 | asAfsgAfaGfaUfgAfgacAfcUfcUfuUfcsusg | 13.4 | 4.1 | 35.4 | 11.4 |
| | | | 60592.1 | | | | | | |
| 4976 | 4977 | 871-893 | | CfsasGfaAfaGfaGfdTGfuCfuCf(Agn)UfcUfuAfL96 | asAfsgAfaGfaUfgAfgacAfcUfcUfuUfcsusg | | | | |
| 4978 | 4979 | 871-893 | | CfsasGfaAfaGfaGfUfGfuCfuCf(Agn)UfcUfuAfL96 | usAfsaGfaUfgAfgAfcacUfcdTuUfcUfgsgsu | | | | |
| 4980 | 4981 | 871-893 | | CfsasGfaAfaGfaGfdTGfuCfuCf(Agn)UfcUfuAfL96 | usAfsaGfaUfgAfgAfcacUfcdTuUfcUfgsgsu | | | | |
| 4982 | 4983 | 871-893 | | CfsasGfaAfaGfaGfdTGfuCfuCf(Agn)UfscUfsuAfsL96 | usAfsaGfaUfgAfgAfcacUfcdTuUfcUfgsgsu | | | | |
| 4984 | 4985 | 871-893 | | CfsasGfaAfaGfaGfdTGfuCfuCf(Agn)UfscusuAfsL96 | usAfsAfGfaUfgAfgAfcacUfcdTuUfcUfgsgsu | | | | |
| 4986 | 4987 | 871-893 | | CfsasGfaAfaGfaGfdTGfuCfuCfs(Agns)UfscUfsuAfsL96 | usAfsaGfaUfgAfgAfcacUfcdTuUfcUfgsgsu | | | | |
| 4988 | 4989 | 871-893 | | CfsasGfaAfaGfaGfdTGfuCfuCfs(Agns)UfscusuAfsL96 | usAfsAfGfaUfgAfgAfcacUfcdTuUfcUfgsgsu | | | | |

TABLE 34
Further sequences of AD-60489 derivative siRNAs

| | SEQ | | | | |
|---|---|---|---|---|---|
| | ID | Target sites | | | |
| SEQ | NO: | of antisense | | | |
| ID NO: | (anti- | sequence on | Duplex | | |
| (sense) | sense) | NM_000688.4 | Name | Sense Sequence (5′-3′) | Antisense Sequence (5′-3′) |
| 4990 | 4991 | 871-893 | AD- | CfsasGfaAfaGfaGfUfGfuCfuCfaUf | usAfsaGfaUfgAfgAfcacUfcUfuUfcUfgsgsu |
| | | | 60489 | cUfuAfL96 | |
| 4992 | 4993 | 871-893 | AD- | CfsasGfaAfaGfaGfuGfuCfuCfa | usAfsAfGfaUfgAfgAfcAfcUfcUfuUfcUfgs |
| | | | 60501.1 | ucuuAfL96 | gsu |
| 4994 | 4995 | 871-893 | AD- | CfsasGfaAfaGfaGfuGfuCfuCfa | usAfsAfGfadTgAfgAfcAfcdTcuudTcugsgsu |
| | | | 60900.1 | ucuuAfL96 | |
| 4996 | 4997 | 871-893 | AD- | csasgaaaGfaGfuGfuCfuCfaucuuaL96 | usAfsAfGfaUfgAfgAfcAfcUfcUfuUfcUfgs |
| | | | 60519.1 | | gsu |
| 4998 | 4999 | 871-893 | AD- | csasgaaaGfaGfuGfuCfuCfaucuuaL96 | usAfsAfGfadTgAfgAfcAfcdTcuudTcugsgsu |
| | | | 60905.1 | | |
| 5000 | 5001 | 871-893 | AD- | csasgaaaGfaGfuGfuCfuCfaucuuaL96 | usAfsaGfaUfgAfgAfcacUfcUfuUfcUfgsgsu |
| | | | 60901.1 | | |
| 5002 | 5003 | 871-893 | AD- | csasgaaaGfaGfuGfuCfuCfaucuuaL96 | usAfsaGfaUfgAfgAfcacUfcUfuUfcUfgsgsu |
| | | | 60495.2 | | |
| 5004 | 5005 | 871-893 | AD- | CfsasGfaAfaGfaGfUfGfuCfuCfaU | usAfsAfGfaUfgAfgAfcAfcUfcUfuUfcUfgs |
| | | | 60935.1 | fcUfuAfL96 | gsu |

TABLE 35
Further sequences and IC50s of AD-60489 and AD-60489 derivative siRNAs

| SEQ | SEQ | Target sites of | | | | |
|---|---|---|---|---|---|---|
| ID NO: | ID NO: | anti-sense seq on | Duplex | | | |
| (sense) | (anti-sense) | NM_000688.4 | Name* | Sense Sequence (5′-3′) | Antisense (AS) Sequence (5′-3′) | IC50 |
| 5006 | 5007 | 871-893 | AD- | CfsasGfaAfaGfaGfUfGfuCfuCfaUfcUfuAfL96 | usAfsaGfaUfgAfgAfcacUfcUfuUfcUfgsgsu | 0.010 |
| | | | 60489.3 | | | |
| 5008 | 5009 | 871-893 | AD- | CfsasGfaAfaGfaGfuGfuCfuCfaucuuAfL96 | usAfsaGfaUfgAfgAfcacUfcUfuUfcUfgsgsu | 0.254 |
| | | | 60495.2 | | | |
| 5010 | 5011 | 871-893 | AD- | CfsasGfaAfaGfaGfuGfuCfuCfaucuuAfL96 | usAfsAfGfaUfgAfgAfcAfcUfcUfuUfcUfgsgsu | 0.006 |
| | | | 60501.2 | | | |
| 5012 | 5013 | 871-893 | AD- | CfsasGfaAfaGfaGfuGfuCfuCfaucuuAfL96 | usAfsAfGfaugAfgAfcAfcucuuucugsgsu | na |
| | | | 60898.1 | | | |
| 5014 | 5015 | 871-893 | AD- | CfsasGfaAfaGfaGfuGfuCfuCfaucuuAfL96 | usAfsAfGfadTgAfgAfcAfcdTcuudTcugsgsu | 0.151 |
| | | | 60900.1 | | | |
| 5016 | 5017 | 871-893 | AD- | CfsasGfaAfaGfaGfuGfuCfuCfaucuuAfL96 | usAfsaGfadTgAfgAfcAfcdTcuudTcugsgsu | 0.033 |
| | | | 60851.1 | | | |
| 5018 | 5019 | 871-893 | AD- | CfsasGfaAfaGfaGfuGfuCfuCfaucuuAfL96 | usAfsAfGfadTgAfgAfcacdTcuudTcugsgsu | 0.065 |
| | | | 60855.1 | | | |
| 5020 | 5021 | 871-893 | AD- | CfsasgaaaGfaGfuGfuCfuCfaucuuAfL96 | usAfsAfGfaUfgAfgAfcAfcUfcUfuUfcUfgsgsu | 0.029 |
| | | | 60507.2 | | | |
| 5022 | 5023 | 871-893 | AD- | CfsasgaaaGfaGfuGfuCfuCfaucuuAfL96 | usAfsaGfaUfgAfgAfcacUfcUfuUfcUfgsgsu | 0.024 |
| | | | 60902.1 | | | |
| 5024 | 5025 | 871-893 | AD- | CfsasgaaaGfaGfuGfuCfuCfaucuuAfL96 | usAfsAfGfaugAfgAfcAfcucuuucugsgsu | na |
| | | | 60904.1 | | | |
| 5026 | 5027 | 871-893 | AD- | CfsasgaaaGfaGfuGfuCfuCfaucuuAfL96 | usAfsAfGfadTgAfgAfcAfcdTcuudTcugsgsu | 0.011 |
| | | | 60894.1 | | | |
| 5028 | 5029 | 871-893 | AD- | CfsasgaaaGfaGfuGfuCfuCfaucuuAfL96 | usAfsaGfadTgAfgAfcAfcdTcuudTcugsgsu | 0.249 |
| | | | 60860.1 | | | |
| 5030 | 5031 | 871-893 | AD- | CfsasgaaaGfaGfuGfuCfuCfaucuuAfL96 | usAfsAfGfadTgAfgAfcacdTcuudTcugsgsu | 1.899 |
| | | | 60864.1 | | | |
| 5032 | 5033 | 871-893 | AD- | CfsasgaaaGfaGfuGfuCfuCfaucuuaL96 | usAfsAfGfaUfgAfgAfcAfcUfcUfuUfcUfgsgsu | 0.019 |
| | | | 60513.2 | | | |
| 5034 | 5035 | 871-893 | AD- | CfsasgaaaGfaGfuGfuCfuCfaucuuaL96 | usAfsaGfaUfgAfgAfcacUfcUfuUfcUfgsgsu | 0.034 |
| | | | 60896.1 | | | |
| 5036 | 5037 | 871-893 | AD- | CfsasgaaaGfaGfuGfuCfuCfaucuuaL96 | usAfsAfGfaugAfgAfcAfcucuuucugsgsu | na |
| | | | 60899.1 | | | |
| 5038 | 5039 | 871-893 | AD- | CfsasgaaaGfaGfuGfuCfuCfaucuuaL96 | usAfsaGfadTgAfgAfcAfcdTcuudTcugsgsu | 0.249 |
| | | | 60868.1 | | | |
| 5040 | 5041 | 871-893 | AD- | CfsasgaaaGfaGfuGfuCfuCfaucuuaL96 | usAfsAfGfadTgAfgAfcacdTcuudTcugsgsu | 0.014 |
| | | | 60872.1 | | | |
| 5042 | 5043 | 871-893 | AD- | csasgaaaGfaGfuGfuCfuCfaucuuaL96 | usAfsAfGfaUfgAfgAfcAfcUfcUfuUfcUfgsgsu | 0.026 |
| | | | 60519.2 | | | |
| 5044 | 5045 | 871-893 | AD- | csasgaaaGfaGfuGfuCfuCfaucuuaL96 | usAfsaGfaUfgAfgAfcacUfcUfuUfcUfgsgsu | 0.080 |
| | | | 60901.1 | | | |
| 5046 | 5047 | 871-893 | AD- | csasgaaaGfaGfuGfuCfuCfaucuuaL96 | usAfsAfGfaugAfgAfcAfcucuuucugsgsu | na |
| | | | 60903.1 | | | |
| 5048 | 5049 | 871-893 | AD- | csasgaaaGfaGfuGfuCfuCfaucuuaL96 | usAfsAfGfadTgAfgAfcAfcdTcuudTcugsgsu | 0.018 |
| | | | 60905.1 | | | |
| 5050 | 5051 | 871-893 | AD- | csasgaaaGfaGfuGfuCfuCfaucuuaL96 | usAfsaGfadTgAfgAfcAfcdTcuudTcugsgsu | 0.091 |
| | | | 60876.1 | | | |
| 5052 | 5053 | 871-893 | AD- | csasgaaaGfaGfuGfuCfuCfaucuuaL96 | usAfsAfGfadTgAfgAfcacdTcuudTcugsgsu | 0.131 |
| | | | 60880.1 | | | |
| 5054 | 5055 | 871-893 | AD- | csasgaaaGfAfGfugucucaucuuaL96 | usAfsAfGfadTgAfgAfcAfcdTcuudTcugsgsu | na |
| | | | 60499.2 | | | |
| 5056 | 5057 | 871-893 | AD- | csasgaaaGfAfGfugucucaucuuaL96 | usAfsaGfaUfgAfgAfcacUfcUfuUfcUfgsgsu | na |
| | | | 60895.1 | | | |
| 5058 | 5059 | 871-893 | AD- | csasgaaaGfAfGfugucucaucuuaL96 | usAfsAfGfaUfgAfgAfcAfcUfcUfuUfcUfgsgsu | na |
| | | | 60897.1 | | | |
| 5060 | 5061 | 871-893 | AD- | csasgaaaGfAfGfugucucaucuuaL96 | usAfsAfGfaugAfgAfcAfcucuuucugsgsu | na |
| | | | 60526.2 | | | |
| 5062 | 5063 | 871-893 | AD- | csasgaaaGfAfGfugucucaucuuaL96 | usAfsaGfadTgAfgAfcAfcdTcuudTcugsgsu | 4.970 |
| | | | 60852.1 | | | |
| 5064 | 5065 | 871-893 | AD- | csasgaaaGfAfGfugucucaucuuaL96 | usAfsAfGfadTgAfgAfcacdTcuudTcugsgsu | na |
| | | | 60856.1 | | | |
| 5066 | 5067 | 871-893 | AD- | csasgaaaGfAfGfugucuca(Tgn)cuuaL96 | usAfsaGfaUfgAfgAfcacUfcUfuUfcUfgsgsu | 0.019 |
| | | | 60861.1 | | | |
| 5068 | 5069 | 871-893 | AD- | csasgaaaGfAfGfugucuca(Tgn)cuuaL96 | usAfsAfGfaUfgAfgAfcAfcUfcUfuUfcUfgsgsu | 0.061 |
| | | | 60865.1 | | | |
| 5070 | 5071 | 871-893 | AD- | csasgaaaGfAfGfugucuca(Tgn)cuuaL96 | usAfsAfGfaugAfgAfcAfcucuuucugsgsu | na |
| | | | 60869.1 | | | |
| 5072 | 5073 | 871-893 | AD- | csasgaaaGfAfGfugucuca(Tgn)cuuaL96 | usAfsAfGfadTgAfgAfcAfcdTcuudTcugsgsu | 0.009 |
| | | | 60873.1 | | | |
| 5074 | 5075 | 871-893 | AD- | csasgaaaGfAfGfugucuca(Tgn)cuuaL96 | usAfsaGfadTgAfgAfcAfcdTcuudTcugsgsu | 0.008 |
| | | | 60877.1 | | | |
| 5076 | 5077 | 871-893 | AD- | csasgaaaGfAfGfugucuca(Tgn)cuuaL96 | usAfsAfGfadTgAfgAfcacdTcuudTcugsgsu | 0.025 |
| | | | 60881.1 | | | |
| 5078 | 5079 | 871-893 | AD- | CfsasGfaAfaGfaGfUfGfuCfuCfaUfcUfu(Agn)L96 | usAfsaGfaUfgAfgAfcacUfcUfuUfcUfgsgsu | 0.022 |
| | | | 60583.2 | | | |
| 5080 | 5081 | 871-893 | AD- | CfsasGfaAfaGfaGfUfGfuCfuCfa(Tgn)cUfuAfL96 | usAfsaGfaUfgAfgAfcacUfcUfuUfcUfgsgsu | 0.031 |
| | | | 60591.3 | | | |
| 5082 | 5083 | 871-893 | AD- | CfsasGfaAfaGfaGfUfGfuCfuCf(Agn)UfcUfuAfL96 | usAfsaGfaUfgAfgAfcacUfcUfuUfcUfgsgsu | 0.010 |
| | | | 60592.3 | | | |
| 5084 | 5085 | 871-893 | AD- | CfsasGfaAfaGfaGfUfGfuCfu(Cgn)aUfcUfuAfL96 | usAfsaGfaUfgAfgAfcacUfcUfuUfcUfgsgsu | 0.006 |
| | | | 60593.2 | | | |
| 5086 | 5087 | 871-893 | AD- | CfsasGfaAfaGfaGfUfGfuCfuCfaUfcUfuAfL96 | usAfsaGfaUfgAfgAfcacUfcUfuUfcUfgsgsu | 0.011 |
| | | | 60489.4 | | | |
| 5088 | 5089 | 871-893 | AD- | CfsasGfaAfaGfaGfdTGfuCfuCfaUfcUfuAfL96 | usAfsaGfaUfgAfgAfcacUfcUfuUfcUfgsgsu | 0.019 |
| | | | 60857.1 | | | |
| 5090 | 5091 | 871-893 | AD- | CfsasGfaAfaGfaGfUfGfuCfuCfaUfcUfuAfL96 | usAfsaGfaUfgAfgAfcacUfcdTuUfcUfgsgsu | 0.012 |
| | | | 60862.1 | | | |
| 5092 | 5093 | 871-893 | AD- | CfsasGfaAfaGfaGfdTGfuCfuCfaUfcUfuAfL96 | usAfsaGfaUfgAfgAfcacUfcdTuUfcUfgsgsu | 0.015 |
| | | | 60866.1 | | | |
| 5094 | 5095 | 871-893 | AD- | CfsasGfaAfaGfaGfdTGfuCfuCfaUfscUfsuAfsL96 | usAfsaGfaUfgAfgAfcacUfcdTuUfcUfgsgsu | 0.012 |
| | | | 60870.1 | | | |
| 5096 | 5097 | 871-893 | AD- | CfsasGfaAfaGfaGfdTGfuCfuCfaUfscusuAfsL96 | usAfsAfGfaUfgAfgAfcacUfcdTuUfcUfgsgsu | 0.003 |
| | | | 60874.1 | | | |
| 5098 | 5099 | 871-893 | AD- | CfsasGfaAfaGfaGfUfGfuCfuCfa(Tgn)cUfuAfL96 | asAfsgAfaGfaUfgAfgacAfcUfcUfuUfcsusg | 0.014 |
| | | | 60591.2 | | | |
| 5100 | 5101 | 871-893 | AD- | CfsasGfaAfaGfaGfdTGfuCfuCfa(Tgn)cUfuAfL96 | asAfsgAfaGfaUfgAfgacAfcUfcUfuUfcsusg | 0.008 |
| | | | 60878.1 | | | |
| 5102 | 5103 | 871-893 | AD- | CfsasGfaAfaGfaGfUfGfuCfuCfa(Tgn)cUfuAfL96 | usAfsaGfaUfgAfgAfcacUfcdTuUfcUfgsgsu | 0.003 |
| | | | 60882.1 | | | |
| 5104 | 5105 | 871-893 | AD- | CfsasGfaAfaGfaGfdTGfuCfuCfa(Tgn)cUfuAfL96 | usAfsaGfaUfgAfgAfcacUfcdTuUfcUfgsgsu | 0.007 |
| | | | 60853.1 | | | |
| 5106 | 5107 | 871-893 | AD- | CfsasGfaAfaGfaGfdTGfuCfuCfa(Tgn)scUfsuAfsL96 | usAfsaGfaUfgAfgAfcacUfcdTuUfcUfgsgsu | 0.013 |
| | | | 60858.1 | | | |
| 5108 | 5109 | 871-893 | AD- | CfsasGfaAfaGfaGfdTGfuCfuCfa(Tgn)scusuAfsL96 | usAfsAfGfaUfgAfgAfcacUfcdTuUfcUfgsgsu | 0.002 |
| | | | 60863.1 | | | |
| 5110 | 5111 | 871-893 | AD- | CfsasGfaAfaGfaGfUfGfuCfuCf(Agn)UfcUfuAfL96 | asAfsgAfaGfaUfgAfgacAfcUfcUfuUfcsusg | 0.013 |
| | | | 60592.2 | | | |
| 5112 | 5113 | 871-893 | AD- | CfsasGfaAfaGfaGfdTGfuCfuCf(Agn)UfcUfuAfL96 | asAfsgAfaGfaUfgAfgacAfcUfcUfuUfcsusg | 0.084 |
| | | | 60867.1 | | | |
| 5114 | 5115 | 871-893 | AD- | CfsasGfaAfaGfaGfUfGfuCfuCf(Agn)UfcUfuAfL96 | usAfsaGfaUfgAfgAfcacUfcdTuUfcUfgsgsu | 0.008 |
| | | | 60871.1 | | | |
| 5116 | 5117 | 871-893 | AD- | CfsasGfaAfaGfaGfdTGfuCfuCf(Agn)UfcUfuAfL96 | usAfsaGfaUfgAfgAfcacUfcdTuUfcUfgsgsu | 0.004 |
| | | | 60875.1 | | | |
| 5118 | 5119 | 871-893 | AD- | CfsasGfaAfaGfaGfdTGfuCfuCf(Agn)UfscUfsuAfsL96 | usAfsaGfaUfgAfgAfcacUfcdTuUfcUfgsgsu | 0.001 |
| | | | 60879.1 | | | |
| 5120 | 5121 | 871-893 | AD- | CfsasGfaAfaGfaGfdTGfuCfuCf(Agn)UfscusuAfsL96 | usAfsAfGfaUfgAfgAfcacUfcdTuUfcUfgsgsu | 0.004 |
| | | | 60883.1 | | | |
| 5122 | 5123 | 871-893 | AD- | CfsasGfaAfaGfaGfdTGfuCfuCfs(Agns)UfscUfsuAfsL96 | usAfsaGfaUfgAfgAfcacUfcdTuUfcUfgsgsu | 0.002 |
| | | | 60854.1 | | | |
| 5124 | 5125 | 871-893 | AD- | CfsasGfaAfaGfaGfdTGfuCfuCfs(Agns)UfscusuAfsL96 | usAfsAfGfaUfgAfgAfcacUfcdTuUfcUfgsgsu | 0.002 |
| | | | 60859.1 | | | |

[0967] As is shown in the table above, a number of duplexes showed efficacy in suppressing ALAS1 mRNA. The following duplexes had an IC50 of less than 0.01 nM: AD-60879, AD-60859, AD-60863, AD-60854, AD-60882, AD-60874, AD-60883, AD-60875, AD-60501, AD-60593, AD-60853, AD-60877, AD-60878, AD-60871, and AD-60873. The following duplexes had an IC50 of less than 0.02 nM: AD-60879, AD-60859, AD-60863, AD-60854, AD-60882, AD-60874, AD-60883, AD-60875, AD-60501, AD-60593, AD-60853, AD-60877, AD-60878, AD-60871, AD-60873, AD-60489, AD-60592, AD-60894, AD-60489, AD-60870, AD-60862, AD-60858, AD-60592, AD-60591, AD-60872, AD-60866, AD-60905, AD-60857, AD-60513, and AD-60861. The following duplexes had an IC50 of less than 0.05 nM: AD-60879, AD-60859, AD-60863, AD-60854, AD-60882, AD-60874, AD-60883, AD-60875, AD-60501, AD-60593, AD-60853, AD-60877, AD-60878, AD-60871, AD-60873, AD-60489, AD-60592, AD-60894, AD-60489, AD-60870, AD-60862, AD-60858, AD-60592, AD-60591, AD-60872, AD-60866, AD-60905, AD-60857, AD-60513, AD-60861, AD-60583.2, AD-60902.1, AD-60881.1, AD-60519.2, AD-60507.2, AD-60591.3, AD-60851.1, AD-60896.1, and AD-60537.2.

### Example 29

### In Vivo Structure Activity Relationship Studies of AD-60489

[0968] Derivatives of the AD-60489 parent siRNA were generated and screened in vivo in rats.

[0969] In Vivo Screen 1 of AD-60489 Derivatives

[0970] The sequences of the siRNAs that were screened are provided in the table below.

TABLE 36
Sequences of ALAS1 siRNA Duplexes

| | | Target | | | |
|---|---|---|---|---|---|
| | SEQ | sites of | | | |
| SEQ | ID | antisense | | | |
| ID | NO: | sequence | | | |
| NO: | (anti- | on | Duplex | | |
| (sense) | sense) | NM_000688.4 | Name | Sense Sequence (5′-3′) | Antisense Sequence (5′-3′) |
| 5126 | 5127 | 871-893 | AD- | CfsasGfaAfaGfaGfUfGfuCfuCfaU | usAfsaGfaUfgAfgAfcacUfcUfuUfcUfgsgsu |
| | | | 60489 | fcUfuAfL96 | |
| 5128 | 5129 | 871-893 | AD- | CfsasGfaAfaGfaGfuGfuCfuCfaucu | usAfsAfGfaUfgAfgAfcAfcUfcUfuUfcUfgsgsu |
| | | | 60501.2 | uAfL96 | |
| 5130 | 5131 | 871-893 | AD- | csasgaaaGfaGfuGfuCfuCfaucuuaL | usAfsAfGfaUfgAfgAfcAfcUfcUfuUfcUfgsgsu |
| | | | 60519.2 | 96 | |
| 5132 | 5133 | 871-893 | AD- | csasgaaaGfaGfuGfuCfuCfaucuuaL | usAfsaGfaUfgAfgAfcacUfcUfuUfcUfgsgsu |
| | | | 60901.1 | 96 | |
| 5134 | 5135 | 871-893 | AD- | CfsasGfaAfaGfaGfuGfuCfuCfauc | usAfsaGfaUfgAfgAfcacUfcUfuUfcUfgsgsu |
| | | | 60495.2 | uuAfL96 | |
| 5136 | 5137 | 871-893 | AD- | CfsasGfaAfaGfaGfuGfuCfuCfauc | usAfsAfGfadTgAfgAfcAfcdTcuudTcugsgsu |
| | | | 60900.1 | uuAfL96 | |
| 5138 | 5139 | 871-893 | AD- | CfsasGfaAfaGfaGfUfGfuCfuCfaUf | usAfsAfGfaUfgAfgAfcAfcUfcUfuUfcUfgsgsu |
| | | | 60935.1 | cUfuAfL96 | |
| 5140 | 5141 | 871-893 | AD- | csasgaaaGfaGfuGfuCfuCfaucuuaL | usAfsAfGfadTgAfgAfcAfcdTcuudTcugsgsu |
| | | | 60905.1 | 96 | |

[0971] Rats were administered a single dose of 3 mg/kg of siRNA. At 5 days following administration of the siRNA, mRNA measurements of rat ALAS1 (rALAS1) mRNA and rat GAPDH (rGAPDH) mRNA were made using bDNA assay, and tissue levels of drug (siRNA) were determined using qPCR.

[0972] As is shown in FIG. 40 (top), the siRNAs AD-60501, AD-60519, AD-60901, AD-60495, AD-60900, and AD-60935 showed improved suppression of ALAS1 mRNA compared with AD-60489. The siRNAs AD-60519, AD-60901, AD-60495, and AD-60935 achieved higher liver levels than did AD-60489 (see FIG. 40, bottom). Thus, most of the duplexes that provided improved suppression of ALAS1 mRNA also achieved higher liver levels.

[0973] At least for the duplexes AD-60489, AD-60519, and AD-60901, efficacy correlated with liver levels of the siRNA (see FIG. 41), such that a higher level of siRNA in liver was associated with greater ALAS1 mRNA suppression.

[0974] In Vivo Screen 2 of AD-60489 Derivatives

[0975] The sequences of the siRNAs that were screened are provided in the table below.

TABLE 37
Sequences of ALAS1 siRNA Duplexes

| | | Target | | | |
|---|---|---|---|---|---|
| | SEQ | sites of | | | |
| SEQ | ID | antisense | | | |
| ID | NO: | sequence | | | |
| NO: | (anti- | on | Duplex | | |
| (sense) | sense) | NM_000688.4 | Name | Sense Sequence (5′-3′) | Antisense Sequence (5′-3′) |
| 5142 | 5143 | 871-893 | AD- | CfsasGfaAfaGfaGfUfGfuCfuCfaUfcU | usAfsaGfaUfgAfgAfcacUfcUfuUfcUfgsgsu |
| | | | 60489 | fuAfL96 | |
| 5144 | 5145 | 871-893 | AD- | CfsasGfaAfaGfaGfdTGfuCfuCf(Agn) | usAfsaGfaUfgAfgAfcacUfcdTuUfcUfgsgsu |
| | | | 60879 | UfscUfsuAfsL96 | |
| 5146 | 5147 | 871-893 | AD- | CfsasGfaAfaGfaGfdTGfuCfuCf(Agn) | usAfsAfGfaUfgAfgAfcAfcUfcUfuUfcUfgsgsu |
| | | | 61190 | UfscUfsuAfsL96 | |
| 5148 | 5149 | 871-893 | AD- | CfsasGfaAfaGfaGfdTGfuCfuCf(Agn) | usAfsAfGfaUfgAfgAfcAfcUfcUfuUfcUfgsgsu |
| | | | 61191 | UfscUfsuAfsL96 | |
| 5150 | 5151 | 871-893 | AD- | csasgaaaGfAfGfugucuca(Tgn)cuuaL | usAfsaGfadTgAfgAfcAfcdTcuudTcugsgsu |
| | | | 60877 | 96 | |
| 5152 | 5153 | 871-893 | AD- | csasgaaaGfAfGfugucuca(Tgn)cuuaL | usAfsaGfadTgAfgAfcAfcdTcuudTcugsgsu |
| | | | 61192 | 96 | |
| 5154 | 5155 | 871-893 | AD- | csasgaaaGfaGfuGfuCfuCfaucuuaL96 | usAfsaGfadTgAfgAfcAfcdTcuudTcugsgsu |
| | | | 60865 | | |
| 5156 | 5157 | 871-893 | AD- | csasgaaaGfAfGfugucuca(Tgn)cuuaL | usAfsaGfaUfgAfgAfcacUfcUfuUfcUfgsgsu |
| | | | 60861 | 96 | |
| 5158 | 5159 | 871-893 | AD- | csasgaaaGfaGfuGfuCfuCfaucuuaL96 | usAfsaGfadTgAfgAfcAfcdTcuudTcugsgsu |
| | | | 60876 | | |
| 5160 | 5161 | 871-893 | AD- | csasgaaaGfaGfuGfuCfuCfaucuuaL96 | usAfsaGfaUfgAfgAfcacUfcdTuUfcUfgsgsu |
| | | | 61193 | | |
| 5162 | 5163 | 871-893 | AD- | csasgaaaGfaGfuGfuCfuCfaucuuaL96 | usAfsAfGfaUfgAfgAfcAfcUfcUfuUfcUfgsgsu |
| | | | 60519 | | |

[0976] Rats were administered a single dose of 2.5 mg/kg of siRNA. At 5 days following administration of the siRNA, mRNA measurements of rat ALAS1 (rALAS1) mRNA and rat GAPDH (rGAPDH) mRNA were made using bDNA assay.

[0977] As is shown in FIG. 42, the siRNAs AD-60879, AD-61190, AD-61191, AD-60865, AD-60861, AD-60876, AD-61193, and AD-60519 showed improved suppression of ALAS1 mRNA compared with AD-60489.

### Example 30

### Multidosing Improves Potency

[0978] To investigate the effects of administering multiple doses of siRNA, rats (n=3 per group) were administered PBS or an siRNA (AD-58632, AD-60925, AD-60419, AD-60445, AD-60892, AD-60489, AD-60519, or AD-60901) at a dose of 2.5 mg/kg twice per week for 2 weeks. The levels of rat ALAS1 (rALAS1) mRNA and rat GAPDH (rGAPDH) mRNA were assessed using bDNA assay.

TABLE 38
Sequences of ALAS1 siRNA Duplexes

| | | Target | | | |
|---|---|---|---|---|---|
| | SEQ | sites of | | | |
| SEQ | ID | antisense | | | |
| ID | NO: | sequence | | | |
| NO: | (anti- | on | Duplex | | |
| (sense) | sense) | NM_000688.4 | Name | Sense Sequence (5′-3′) | Antisense Sequence (5′-3′) |
| 5164 | 5165 | 873-895 | AD- | GfsasAfaGfaGfuGfUfCfuCfaUfc | asAfsgAfaGfaUfgAfgacAfcUfcUfuUfcsusg |
| | | | 58632 | UfuCfuUfL96 | |
| 5166 | 5167 | 873-895 | AD- | GfsasAfaGfAfGfuGfucucauc(Tgn) | asAfsGfAfaGfaUfgAfgAfcAfcUfcUfuUfcsusg |
| | | | 60925 | ucuuL96 | |
| 5168 | 5169 | 873-895 | AD- | GfsasAfaGfAfGfuGfdTcucaucuuc | asAfsGfAfaGfaugAfgAfcAfcucuuucsusg |
| | | | 60419 | uuL96 | |
| 5170 | 5171 | 873-895 | AD- | GfsasAfaGfAfGfuGfucucauc(Tgn) | asAfsGfAfaGfaugAfgAfcAfcucuuucsusg |
| | | | 60445 | ucuuL96 | |
| 5172 | 5173 | 873-895 | AD- | gsasaagaGfuGfuCfucaucuucuuL96 | asAfsGfAfaGfaugAfgAfcAfcucuuucsusg |
| | | | 60892 | | |
| 5174 | 5175 | 871-893 | AD- | CfsasGfaAfaGfaGfUfGfuCfuCfa | usAfsaGfaUfgAfgAfcacUfcUfuUfcUfgsgsu |
| | | | 60489 | UfcUfuAfL96 | |
| 5176 | 5177 | 871-893 | AD- | csasgaaaGfaGfuGfuCfuCfaucuuaL | usAfsAfGfaUfgAfgAfcAfcUfcUfuUfcUfgsgsu |
| | | | 60519.2 | 96 | |
| 5178 | 5179 | 871-893 | AD- | csasgaaaGfaGfuGfuCfuCfaucuuaL | usAfsaGfaUfgAfgAfcacUfcUfuUfcUfgsgsu |
| | | | 60901.1 | 96 | |

[0979] As is shown in FIG. 43, the AD-58632 derivative siRNAs AD-60892, AD-60419, AD-60445, and AD-60925 showed improved suppression of ALAS1 mRNA compared with the parent AD-58632. In addition, the AD-60489 derivative siRNAs AD-60519 and AD-60901 showed improved suppression of ALAS1 mRNA compared with the parent AD-60489.

### Example 31

### Multidosing Studies with AD-60519 and AD-60489

[0980] The therapeutic efficacy of AD-60519 was investigated in a rat AIP model. The experimental design is shown in FIG. 44 (top). Rats were treated with PBS or ALAS1-GalNAc siRNA at either 2.5 mg/kg or 5 mg/kg two times per week for three weeks. Phenobarbital (Phenobarb) and a PBGD siRNA in an AF11 LNP formulation was administered at the times indicated in FIG. 44. A control group received PBS and the PBGD siRNA only, without Phenobarbital induction. Urine was collected at days 18-19 of the study.

[0981] The results are shown in FIG. 44 (bottom). Administering phenobarbital and PBS induced ALAS1 mRNA expression and increased levels of PBG and ALA in urine (see FIG. 44), compared with PBS only. Treatment with a total of six doses of 2.5 or 5 mg/kg of AD-60519 twice per week suppressed the phenobarbital induced increases in urine PBG and urine ALA (FIG. 44). These results demonstrate that AD-60519 is effective in suppressing ALA and PBG when repeated doses as low as 2.5 mg/kg are administered. In particular, AD-60519 was effective in reducing increases in urine levels of PBG and ALA associated with acute attacks in the rat AIP model.

[0982] In further studies using the same experimental design but in a mouse model (see schematic at top of FIG. 44), the therapeutic efficacy of AD-60519 and AD-60489 in suppressing phenobarbital induced increases in serum PBG and ALA was investigated. In the PBS (“Saline”) control group, administration of phenobarbital increased levels of PBG and ALA in serum (see FIG. 45), compared with PBS only. Treatment with a total of six doses of 2.5 or 5 mg/kg of AD-60519 or AD-60489 twice per week suppressed the phenobarbital induced increases in serum PBG and serum ALA (FIG. 44). These results demonstrate that both AD-60519 and AD-60489 are effective in suppressing ALA and PBG when repeated doses as low as 2.5 mg/kg are administered. In particular, AD-60519 and AD-60489 were effective in reducing increases in serum PBG and ALA associated with acute attacks.

[0983] Because treatments in this example were administered prior to the phenobarbital induction, these results indicate that AD-60519 and AD-60489 have prophylactic effects.

### Example 32

### Further siRNA Sequences

[0984] The following AD-58632 derivative (Table 39) and AD-60489 derivative (Table 40) siRNA sequences have also been generated.

TABLE 39
AD-58632 derivative sequences

| | | Target | | | |
|---|---|---|---|---|---|
| | SEQ | sites of | | | |
| SEQ | ID | antisense | | | |
| ID | NO: | sequence | | | |
| NO: | (anti- | on | Duplex | | |
| (sense) | sense) | NM_000688.4 | Name | Sense Sequence (5′-3′) | Antisense Sequence (5′-3′) |
| 5180 | 5181 | 873-895 | AD- | GfsasAfaGfAfGfuGfucucauc(Tgn)uc | asAfsgAfaGfaugAfgAfcAfcucuuucsusg |
| | | | 60802 | uuL96 | |
| 5182 | 5183 | 873-895 | AD- | GfsasAfaGfAfGfuGfucucauc(Tgn)uc | asAfsgAfaGfaugAfgacAfcucuuucsusg |
| | | | 60824 | uuL96 | |
| 5184 | 5185 | 873-895 | | GfsasAfaGfAfGfuGfucucauc(Tgn)uc | asAfsgAfaGfaUfgAfgAfcAfcUfcUfuUfcsusg |
| | | | | uuL96 | |
| 5186 | 5187 | 873-895 | AD- | GfsasAfaGfAfGfuGfdTcucaucuucuu | asAfsgAfaGfaugAfgAfcAfcucuuucsusg |
| | | | 60843 | L96 | |
| 5188 | 5189 | 873-895 | AD- | GfsasAfaGfAfGfuGfdTcucaucuucuu | asAfsgAfaGfaugAfgacAfcucuuucsusg |
| | | | 60847 | L96 | |
| 5190 | 5191 | 873-895 | | GfsasAfaGfAfGfuGfdTcucaucuucuu | asAfsgAfaGfaUfgAfgAfcAfcUfcUfuUfcsusg |
| | | | | L96 | |
| 5192 | 5193 | 873-895 | AD- | GfsasAfaGfaGfuGfuCfuCfaucuuCfuu | asAfsgAfaGfaugAfgAfcAfcucuuucsusg |
| | | | 60819 | L96 | |
| 5194 | 5195 | 873-895 | AD- | GfsasAfaGfaGfuGfuCfuCfaucuuCfuu | asAfsgAfaGfaugAfgacAfcucuuucsusg |
| | | | 60823 | L96 | |
| 5196 | 5197 | 873-895 | | GfsasAfaGfaGfuGfuCfuCfaucuuCf | asAfsgAfaGfaUfgAfgAfcAfcUfcUfuUfcsusg |
| | | | | uuL96 | |
| 5198 | 5199 | 873-895 | | GfsasAfaGfaGfuGfdTCfuCfaUfc(Tgn) | asAfsgAfaGfaugAfgAfcAfcucuuucsusg |
| | | | | uCfuUfL96 | |
| 5200 | 5201 | 873-895 | | GfsasAfaGfaGfuGfdTCfuCfaUfc(Tgn) | asAfsgAfaGfaugAfgacAfcucuuucsusg |
| | | | | uCfuUfL96 | |
| 5202 | 5203 | 873-895 | | GfsasAfaGfaGfuGfdTCfuCfaUfc(Tgn) | asAfsgAfaGfaUfgAfgAfcAfcUfcUfuUfcsusg |
| | | | | uCfuUfL96 | |
| 5204 | 5205 | 873-895 | AD- | gsasaagaGfuGfuCfucaucuucuuL96 | asAfsgAfaGfaugAfgAfcAfcucuuucsusg |
| | | | 60853 | | |
| 5206 | 5207 | 873-895 | AD- | gsasaagaGfuGfuCfucaucuucuuL96 | asAfsgAfaGfaugAfgacAfcucuuucsusg |
| | | | 60839 | | |
| 5208 | 5209 | 873-895 | | gsasaagaGfuGfuCfucaucuucuuL96 | asAfsgAfaGfaUfgAfgAfcAfcUfcUfuUfcsusg |
| 5210 | 5211 | 873-895 | | gsasaagaGfuGfdTCfucaucuucuuL96 | asAfsgAfaGfaugAfgAfcAfcucuuucsusg |
| 5212 | 5213 | 873-895 | | gsasaagaGfuGfdTCfucaucuucuuL96 | asAfsgAfaGfaugAfgacAfcucuuucsusg |
| 5214 | 5215 | 873-895 | | gsasaagaGfuGfdTCfucaucuucuuL96 | asAfsgAfaGfaUfgAfgAfcAfcUfcUfuUfcsusg |

TABLE 40
AD-60489 derivative sequences

| | | Target | | | |
|---|---|---|---|---|---|
| | SEQ | sites of | | | |
| SEQ | ID | antisense | | | |
| ID | NO: | sequence | | | |
| NO: | (anti- | on | Duplex | | |
| (sense) | sense) | NM_000688.4 | Name | Sense Sequence (5′-3′) | Antisense Sequence (5′-3′) |
| 5216 | 5217 | 871-893 | | CfsasGfaAfaGfaGfdTGfuCfuCf(Agn) | usAfsaGfadTgAfgAfcAfcdTcuudTcugsgsu |
| | | | | UfscUfsuAfsL96 | |
| 5218 | 5219 | 871-893 | AD- | CfsasGfaAfaGfaGfdTGfuCfuCf(Agn) | usAfsaGfaUfgAfgAfcacUfcdTuUfcUfgsgsu |
| | | | 60879 | UfscUfsuAfsL96 | |
| 5220 | 5221 | 871-893 | | CfsasGfaAfaGfaGfdTGfuCfuCf(Agn) | usAfsAfGfaUfgAfgAfcAfcUfcUfuUfcUfgsgsu |
| | | | | UfscUfsuAfsL96 | |
| 5222 | 5223 | 871-893 | | CfsasGfaAfaGfaGfdTGfuCfuCf(Agn) | usAfsaGfaUfgAfgAfcacUfcUfuUfcUfgsgsu |
| | | | | UfscUfsuAfsL96 | |
| 5224 | 5225 | 871-893 | AD- | csasgaaaGfAfGfugucuca(Tgn) | usAfsaGfadTgAfgAfcAfcdTcuudTcugsgsu |
| | | | 60877 | cuuaL96 | |
| 5226 | 5227 | 871-893 | | csasgaaaGfAfGfugucuca(Tgn) | usAfsaGfaUfgAfgAfcacUfcdTuUfcUfgsgsu |
| | | | | cuuaL96 | |
| 5228 | 5229 | 871-893 | AD- | csasgaaaGfAfGfugucuca(Tgn)cuua | usAfsAfGfaUfgAfgAfcAfcUfcUfuUfcUfgsgsu |
| | | | 60865 | L96 | |
| 5230 | 5231 | 871-893 | AD- | csasgaaaGfAfGfugucuca(Tgn)cuua | usAfsaGfaUfgAfgAfcacUfcUfuUfcUfgsgsu |
| | | | 60861 | L96 | |
| 5232 | 5233 | 871-893 | AD- | csasgaaaGfaGfuGfuCfuCfaucuuaL96 | usAfsaGfadTgAfgAfcAfcdTcuudTcugsgsu |
| | | | 60876 | | |
| 5234 | 5235 | 871-893 | | csasgaaaGfaGfuGfuCfuCfaucuuaL96 | usAfsaGfaUfgAfgAfcacUfcdTuUfcUfgsgsu |
| 5236 | 5237 | 871-893 | AD- | csasgaaaGfaGfuGfuCfuCfaucuuaL96 | usAfsAfGfaUfgAfgAfcAfcUfcUfuUfcUfgsgsu |
| | | | 60519 | | |

### Example 33

### Further Multidose Studies with AD-60519

[0985] The therapeutic efficacy of AD-60519 was investigated in a rat AIP model like that used in Example 31. The experimental design is shown in FIG. 46 (top). Rats were treated with PBS or ALAS1-GalNAc siRNA at 3 mg/kg, 1 mg/kg, or 0.3 mg/kg once per week for four weeks (treatment on day 0, day 7, day 14, and day 21). Phenobarbital (Phenobarb) and a PBGD siRNA in an AF11 LNP formulation were administered at the times indicated in FIG. 46. A control group received PBS and the PBGD siRNA only, without phenobarbital induction. Urine was collected at day 25 of the study.

[0986] The results are shown in FIG. 46 (bottom) and in FIG. 47. Administering phenobarbital and PBS induced ALAS1 mRNA expression and increased levels of PBG and ALA in urine, compared with PBS only. Treatment with a total of four doses of 3 mg/kg, 1 mg/kg, or 0.3 mg/kg of AD-60519 once per week suppressed phenobarbital induced increases in levels of rat ALAS1 mRNA in liver in a dose-dependent manner (see FIG. 46). (The levels of rat liver ALAS1 (rALAS1) mRNA are expressed relative to the levels of rat GAPDH mRNA.) The levels of urine PBG and urine ALA also showed dose-dependent treatment effects.

[0987] Repeated weekly doses of AD-60519 were effective in suppressing ALAS1 mRNA expression and in reducing elevated levels of ALA and PBG associated with induced acute attacks in a rat AIP model. These treatment effects were dose dependent. These results illustrate that AD-60519 can act prophylactically when dosed prior to an attack.

### Example 34

### Multidose Effects of ALAS1 siRNA GalNAc Conjugates in Non-Human Primates

[0988] The effects of ALAS1 siRNA GalNAc conjugates in suppressing liver ALAS1 mRNA and circulating ALAS1 mRNA was investigated in a non-human primate (NHP) study. The GalNAc conjugates AD-58632, AD-60519, AD-61193, and AD-60819 were employed. The study design is shown in Table 41 and in FIG. 48.

TABLE 41
NHP study design

| | | | Dose | Dose | | | Dose | |
|---|---|---|---|---|---|---|---|---|
| Test | Group | | Level | Conc | Dose | Dose | Volume | Dose |
| Article | # | N | (mg/kg) | (mg/mL) | Frequency | Days | (mL/kg) | Route |
| AD-58632 | 1 | 3 | 2.5 | 1.25 | QD × 5 WK1, | 1, 2, 3, 4, | 2 | SC |
| | | | | | BIW WK2-4 | 5, 8, 11, | | |
| AD-60519 | 2 | 3 | 1.25 | 0.625 | QD × 5 WK1, | 15, 18, | | |
| | | | | | BIW WK2-4 | 22, 25 | | |
| | 3 | 3 | 2.5 | 1.25 | QD × 5 WK1, | | | |
| | | | | | BIW WK2-4 | | | |
| | 4 | 3 | 2.5 | 1.25 | QD × 5 WK1, | 1, 2, 3, 4, | | |
| | | | | | QW WK2-4 | 5, 11, 18, | | |
| | 5 | 3 | 5 | 2.5 | QD × 5 WK1, | 25 | | |
| | | | | | QW WK2-4 | | | |
| AD-61193 | 6 | 3 | 2.5 | 1.25 | QD × 5 WK1, | 1, 2, 3, 4, | | |
| | | | | | BIW WK2-4 | 5, 8, 11, | | |
| | | | | | | 15, 18, | | |
| | | | | | | 22, 25 | | |
| AD-60819 | 7 | 3 | 2.5 | 1.25 | QD × 5 WK1, | 1, 2, 3, 4, | | |
| | | | | | BIW WK2-4 | 5, 8, 11, | | |
| | | | | | | 15, 18, | | |
| | | | | | | 22, 25 | | |

[0989] Each group received multiple subcutaneous doses of an ALAS1 siRNA GalNAc conjugate at a dose volume of 2 mg/ml. Group 1 (n=3) received 2.5 mg/kg of 1.25 mg/ml AD-58632 on days 1, 2, 3, 4, 5, 8, 11, 15, 18, 22, and 25. Group 2 (n=3) received 1.25 mg/kg of 0.625 mg/ml AD-60519 on 1, 2, 3, 4, 5, 8, 11, 15, 18, 22, and 25. Group 3 (n=3) received 2.5 mg/kg of 1.25 mg/ml AD-60519 on days 1, 2, 3, 4, 5, 8, 11, 15, 18, 22, and 25. Group 4 (n=3) received 2.5 mg/kg of 1.25 mg/ml AD-60519 on days 1, 2, 3, 4, 5, 11, 18, and 25. Group 5 (n=3) received 5 mg/kg of 2.5 mg/ml AD-60519 on days 1, 2, 3, 4, 5, 11, 18, and 25. Group 6 (n=3) received 2.5 mg/kg of 1.25 mg/ml AD-61193 on days 1, 2, 3, 4, 5, 8, 11, 15, 18, 22, and 25. Group 7 (n=3) received 2.5 mg/kg of 1.25 mg/ml of AD-60819 on days 1, 2, 3, 4, 5, 8, 11, 15, 18, 22, and 25.

[0990] Serum samples for the circulating extracellular RNA detection (cERD) assay (see Example 21) were collected on days −3, 7, 13, 21, 27, 39, 46, and 60 (in FIG. 48, “PD Draws” indicates the days on which serum was collected). Serum was collected for a clinical chemistry panel on days −3 and 6. The clinical chemistry panel included assessment of the levels of alanine aminotransferase (ALT), aspartate aminotransferase (AST), and alkaline phosphatase (ALP). ALAS1 mRNA silencing was evaluated in liver tissue obtained from a liver biopsy taken on day 21 (see FIG. 48). The biopsy was taken after a serum draw.

Suppression of ALAS1 mRNA Levels in Liver

[0991] The liver ALAS1 mRNA levels at study day 21 are shown in FIG. 49. The results are shown as a percentage of the average level observed in a control group treated with PBS. Results are shown as the average values for each treatment group.

[0992] These results presented in FIG. 49 demonstrate that compared with control animals that received PBS treatment, all of the treatment conditions were effective in suppressing liver levels of ALAS1 mRNA. The treatments achieved mRNA silencing ranging from about 20% to 80% (corresponding to ALAS1 mRNA levels ranging from about 80% to 20% of control levels). Individual animals that received AD-58632 showed silencing of about 20-50%, with the average level of silencing being about 40% (ALAS1 mRNA levels were on average about 60% of control levels). With all of the dosing schedules employed, AD-60519 was highly effective in suppressing ALAS1 mRNA levels. Individual animals that received AD-60519 showed silencing of between about 60% and 80% (ALAS1 mRNA levels were about 20% to 40% of control levels). On average, AD-60519 treatment regimens achieved silencing of between about 65% and 75%. As is disclosed herein AD-60519 is a derivative of AD-60489. Similar results for AD-60489 are described in Example 20 and shown in FIG. 30. Furthermore, AD-61193 (a derivative of AD-60489) and AD-60819 (a derivative of AD-58632) also achieved silencing of more than 50%. It is noteworthy that the levels of silencing reported in this example and in Example 20 (e.g., about 20% to 80%) were achieved even in a “non-induced” state; it is anticipated that in an induced state, e.g., when levels of ALAS1 are acutely or chronically elevated (e.g., in a patient having or at risk for a porphyria, e.g., an acute hepatic porphyria, e.g., AIP), lower levels of silencing, e.g., reduction of ALAS1 mRNA levels to normal or pre-attack levels, can suffice to achieve therapeutic efficacy.

Suppression of Circulating Extracellular ALAS1 mRNA Levels

[0993] FIG. 50 shows circulating extracellular ALAS1 mRNA levels (means and standard deviations) at each timepoint throughout the study when serum samples were obtained. The circulating extracellular ALAS1 mRNA results demonstrate efficacy of mRNA silencing following multidose treatment with each of the siRNAs studied (AD60519, AD-61193, AD-60819, and AD-58632). In all groups, the greatest suppression effect on circulating ALAS1 mRNA was observed on day 27, following the final dose of siRNA on day 25. In all treatment groups, during the weeks after the treatment ceased, ALAS1 mRNA levels gradually increased and returned to baseline by the final measurement on day 60.

[0994] The most pronounced suppression of circulating ALAS1 mRNA (maximal silencing of nearly 80%) was observed in Group 3 (2.5 mg/kg AD-60519 QDx5, BIWx3) and Group 5 (5 mg/kg AD-60519, QDx5, QWx3). Group 2 (1.25 mg/kg AD-60519, QDx5, BIWx3), Group 4 (2.5 mg/kg AD-60519, QDx5, QWx3), Group 7 (2.5 mg/kg AD-60819, QDx5, BIWx3), and Group 6 (2.5 mg/kg AD-61193, QDx5, BIWx3) also showed excellent suppression, with maximal silencing (day 27) of greater than 50%. In group 1, notable silencing (more than 30% on day 27) was also achieved.

[0995] These results are consistent with the liver ALAS1 mRNA results and confirm the potent activity of AD-60519. At dose levels as low as 1.25 mg/kg, AD-60519 provided 65-75% silencing.

Correlation Between Circulating and Liver ALAS1 mRNA Levels

[0996] FIG. 27 shows the levels of the ALAS1 mRNA in liver (left bars) and in serum (right bars). There is a good correlation between the relative ALAS1 mRNA levels measured in liver and in serum, indicating that these measurements provide consistent results.

### Example 35

### Rat Single Dose Study of AD-60519 and AD-60589 Using a Urine cERD Assay to Monitor the Duration of ALAS1 mRNA Suppression

[0997] A single dose study was conducted in rats using the ALAS1 siRNA GalNAc conjugates AD-60489 and AD-60519. The efficacy of these GalNAc conjugates in inhibiting expression of ALAS1 mRNA was monitored using assessments of urine with a circulating extracellular RNA detection assay. The assay was similar to the assay used in Examples 21 and 34, except that urine samples were used. The urine samples were lyophilized to concentrate it. Lyophilized urine was resuspended in 4 ml dH2O and vortexed. Then the sample was centrifuged at 4,000×g for 10-20 minutes to pellet any debris. Remaining steps were similar to those described in Example 21.

[0998] Groups of rats were administered a single dose of 10 mg/kg of AD-60489 or AD-60519. The normalized levels of ALAS1 mRNA at various timepoints throughout the study are shown in FIG. 51. The timepoint indicated as “0 hours” is for the baseline pre-dose urine sample drawn just prior to administration of the ALAS1 mRNA. Results for subsequent timepoints are expressed as a fraction of the pre-dose level.

[0999] As can be seen from the results shown in FIG. 51, AD-60519 provided improved potency compared with AD-60489. At its maximum, the single dose of AD-60519 provided a suppression of up to about 80%, whereas the suppression provided by AD-60489 was about 60%. The effect of a single 10 mg/kg dose of these ALAS1 siRNAs in suppressing ALAS1 mRNA lasted about 21 days. These results demonstrate the validity of the urine cERD assay for monitoring ALAS1 mRNA levels.

### Example 36

### Pharmacological Effects of AD-60519 in Non-Human Primates

[1000] A further study of the effects of the ALAS1 siRNA GalNAc conjugate AD-60519 was conducted in a non-human primates. The study investigated the effect of weeky versus biweekly dosing, use of a loading dose versus no loading dose, and the kinetics of ALAS1 mRNA silencing following a single dose. The design of the study is shown in Table 42 and in FIG. 52.

TABLE 42
Pharmacology Study Design for Study with AD-60519

| | | | | Material | | | Dose | |
|---|---|---|---|---|---|---|---|---|
| Group | | Dose Level | Dose | Needs | Dose Vol | Dose | Conc | Dose |
| # | N | (mg/kg) | Frequency | (mg)* | (mL/kg) | Days | (mg/mL) | Route |
| 1 | 3 | 2.5 | QW × 8 Wks | 210 | 0.125 | 1, 8, 15, | 20 | SC |
| 2 | 3 | 5 | QW × 8 Wks | 420 | 0.25 | 22, 29, | | |
| | | | | | | 36, 43, | | |
| | | | | | | 50 | | |
| 3 | 3 | Load- | Load D1-D3, | 525 | 0.25/25 | 1, 2, 3, | | |
| | | QD × 3@5 | QW × 7 Wks | | | 8, 15, | | |
| | | mg/kg, maint- | | | | 22, 29, | | |
| | | 5 mg/kg | | | | 36, 43, | | |
| | | | | | | 50 | | |
| 4 | 3 | Load- | Load D1-D3, | 270 | 0.25/0.125 | | | |
| | | QD × 3@5 | QW × 7 Wks | | | | | |
| | | mg/kg, maint- | | | | | | |
| | | 2.5 mg/kg | | | | | | |
| 5 | 3 | 5 | BIW × 8 Wks | 924 | 0.25 | 1, 4, 8, | | |
| | | | | | | 11, 15, | | |
| | | | | | | 18, 22 | | |
| | | | | | | 25, 29, | | |
| | | | | | | 32, 36, | | |
| | | | | | | 39, 43, | | |
| | | | | | | 46, 50, | | |
| | | | | | | 53 | | |
| 6 | 3 | 1 | Single Dose | 12 | 0.05 | 1 | | |
| 7 | 3 | 10 | Single Dose | 116 | 0.5 | 1 | | |

[1001] Each group received one or more subcutaneous doses of AD-60519 as provided in Table 42. Group 1 (n=3) received 2.5 mg/kg at a dose volume of 0.125 ml/kg once per week for 8 weeks (doses were administered on dose days 1, 8, 15, 22, 29, 36, 43, and 50). Group 2 (n=3) received 5 mg/kg at a dose volume of 0.25 mg/ml once per week for 8 weeks (doses were administered on dose days 1, 8, 15, 22, 29, 36, 43, and 50). Group 3 (n=3) received a loading dose of 5 mg/kg at a dose volume of 0.25 ml/kg once per day for three days followed by a maintenance dose of 5 mg/kg at a dose volume of 0.25 ml/kg once per week for 7 weeks (doses were administered on days 1, 2, 3, 8, 15, 22, 29, 36, 43, and 50). Group 4 (n=3) received a loading dose of 5 mg/kg at a dose volume of 0.25 ml/kg once per day for three days followed by a maintenance dose of 2.5 mg/kg at a dose volume of 0.125 ml/kg once per week for 7 weeks (doses were administered on days 1, 2, 3, 8, 15, 22, 29, 36, 43, and 50). Group 5 (n=3) received 5 mg/kg at a dose volume of 0.25 ml/kg twice per week for 8 weeks (doses were administered on dose days 1, 4, 8, 11, 15, 18, 22, 25, 29, 32, 36, 39, 43, 46, 50, and 53). Group 6 (n=3) received a single dose of 1 mg/kg at a dose volume of 0.05 ml/kg on day 1. Group 7 (n=3) received a single dose of 10 mg/kg at a dose volume of 0.5 ml/kg on day 1.

[1002] Serum samples (listed as “PD draws” in FIG. 52), plasma samples (listed as “PK draws” in FIG. 52) and urine samples were collected as indicated in FIG. 52 and in Table 43. The urine and serum samples were subjected to the cERD assay. All blood and urine samples collected on the day of a liver biopsy were collected prior to the liver biopsy.

TABLE 43
Sample Collection Schedule

| | | | | Urine for exploratory | | | |
|---|---|---|---|---|---|---|---|
| Serum for mRNA Detection | | Liver Biopsy | | mRNA Detection ** | | Plasma for PK | |
| Gps 1-4 | Day −3, | Groups | Day | Gps 1-5 | Day −3, and | Gp7 | Day −3, |
| | and Days | 1-5 | 24* | | Days 24*, | | and Day |
| | 5, 10, 17, | | | | 52 | | 1 @ |
| | 24, 31, 38, | | | | | | 0.25, 0.5, |
| | 45, 52, 57, | | | | | | 1, 2, 4, 8, |
| | 64, 78, 92 | | | | | | 12 hours |
| Gps 5 | Day −3, | Groups | Day | | | | and Days |
| | and Days | 6-7 | 4* | | | | 2, 3, 4, 5, |
| | 3, 10, 17, | | | | | | 6, 8, 9, |
| | 24, 31, 38, | | | | | | 15, 22, |
| | 45, 52, 60, | | | | | | 29, 36 |
| | 67, 81, 95 | | | | | | |
| Gps 6-7 | Day −3, | | | Gps 6-7 | Day −3, and | | |
| | and Days | | | | Days 4*, | | |
| | 2, 4, 6, 9, | | | | 36 | | |
| | 15, 22, 29, | | | | | | |
| | 36 | | | | | | |

*All blood samples and urine were collected prior to the liver biopsy
** First Morning Urine collection

[1003] The liver ALAS1 mRNA results are shown in FIG. 53. Significant ALAS1 mRNA suppression was achieved in all study conditions. Up to 75-80% ALAS1 silencing was achieved across multi-dose regimens using AD-60519. At three days after a single dose, silencing of about 15% was achieved with a single dose of 1 mg/kg, and silencing of about 70% was achieved with a single dose of 10 mg/kg (see FIG. 53). Comparison of the data from groups 1 and 7 reveals a slight difference in kinetics after a single dose (in group 7) versus multiple doses (group 1) of the same cumulative amount (30 mg administered), as assessed 3 days post-dose in group 7 and at two days after the fourth dose in group 1. In particular, greater silencing was observed after a single dose (silencing of about 70% on average in group 7 versus silencing of about 45% on average in group 1). See FIG. 54. This type of result was also observed in rat studies.

[1004] The serum ALAS1 mRNA results through day 22 are shown in FIG. 54 (top). The correlation between liver ALAS1 mRNA, serum ALAS1 mRNA, and plasma ALAS1 mRNA is shown in FIG. 55. These results demonstrate a good correlation between liver, serum, and urine ALAS1 mRNA levels. The results also provide further evidence demonstrating potent activity of AD-60519. Silencing of 55-75% was observed at at all dose levels across all multi-dose dosing regimens. Administering loading doses (once per day for 3 days, as in groups 3 and 4) resulted in slightly more rapid down-regulation of ALAS1 mRNA. The groups that received weekly (groups 1 and 2) or biweekly doses (group 5) doses ultimately showed comparable levels of ALAS1 mRNA suppression, indicating that accumulation over time provides sustained knockdown.

[1005] Results showing the kinetics of ALAS1 mRNA silencing after a single dose are shown in FIG. 54 (bottom). In the 1 mg/kg group, an ALAS1 mRNA suppression of about 20% was observed by day 6. In the 10 mg/kg group, there was a rapid, about 70% ALAS1 mRNA reduction by day 4, with recovery to within 20% of baseline at day 22 (21 days post-dose). Levels of serum ALAS1 mRNA returned to baseline after about 2 weeks or 4 weeks following a 1 mg/kg or 10 mg/kg single dose, respectively.

[1006] The full time course of the serum ALAS mRNA up to 8 weeks after administration of the AD-60519 is shown in FIG. 56. All groups reached a maximum of 80% ALAS1 mRNA suppression following 5 to 8 weeks of ALN-AS1 dosing. Groups with three daily doses in week 1 (QDx3) had a faster onset of ALAS1 mRNA suppression than those just dosed once in the first week (QWx8). All animals returned to baseline ALAS1 levels, approximately 30-40 days post the last dose

### Example 37

### Production of an siRNA Drug Product

[1007] ALN-60519 (FIG. 57) is a chemically synthesized double stranded oligonucleotide covalently linked to a ligand containing three N-acetylgalactosamine (GalNAc) residues. All nucleotides are 2′-OMe or 2′-F modified and are connected through 3′-5′ phosphodiester linkages, thus forming the sugar-phosphate backbone of the oligonucleotide. The sense strand and the antisense strand contain 21 and 23 nucleotides, respectively. The 3′-end of the sense strand is conjugated to the triantennary GalNAc moiety (referred to as L96) through a phosphodiester linkage. The antisense strand contains four phosphorothioate linkages—two at the 3′ end and two at the 5′ end. The sense strand contains two phosphorothioate linkages at the 5′ end. The 21 nucleotides of the sense strand hybridize with the complementary 21 nucleotides of the antisense strand, thus forming 21 nucleotide base pairs and a two-base overhang at the 3′-end of the antisense strand. The two single strands, the sense strand and the antisense strand, were synthesized by conventional solid phase oligonucleotide synthesis, employing standard phosphoramidite chemistry with the 5′-hydroxyl group protected as dimethoxytriphenylmethyl (DMT) ether. Each strand was assembled from the 3′ to the 5′ terminus by sequential addition of protected nucleoside phosphoramidites.

[1008] AD-60519, also referred to herein as ALN-60519, was formulated as a solution for Injection for subcutaneous use, referred to herein as ALN-AS1. ALN-60519 was dissolved in water for injection (WFI) and the pH was adjusted (target 7.0). The concentration of ALN-60519 was determined and adjusted by adding WFI. The solution with a final concentration of approximately 200 mg/mL was then filter sterilized and filled into 2 mL Type I glass vials. A fill volume of approximately 0.55 mL was chosen to permit complete withdrawal of 0.5 mL of drug product.

### Example 38

### Measurement of Serum or Urine ALAS1 mRNA Levels in AIP Patients or Healthy Volunteers Using cERD Method

[1009] Non-human primate pharmacology studies with ALN-AS1 indicated that the circulating extracellular RNA detection (cERD) method for measuring the ALAS1 mRNA in serum or urine was robust and reproducible. The cERD assay was also used to measure ALAS1 mRNA levels in serum and urine from AIP patients and healthy volunteers. Serum ALAS1 mRNA levels were generally increased in AIP patients relative to healthy volunteers, consistent with the role ALAS1 induction plays in disease pathophysiology (FIG. 58). Importantly, levels of ALAS1 in serum and urine within the same patient correlated with each other. In two patients that had repeat collections of urine and serum the ALAS1 mRNA level was consistent over time. Collectively, these data indicate that ALAS1 mRNA can be measured in serum and urine samples from human subjects including AIP patients, and the cERD method is useful for tracking the pharmacodynamic activity of ALN-AS1.

### Example 39

### Exemplary Clinical Studies

[1010] A human study can be conducted to determine the safety and tolerability of ALN-AS1 when administered as a single dose and multiple doses to AIP patients that are asymptomatic high excreters (ASHE) (patients who have elevated levels of ALA and/or PBG, as described herein) or AIP patients who have recurrent attacks.

[1011] Secondary objectives include the characterization of plasma and urine PK for ALN-AS1 as well as post-dose assessment of the impact of ALN-AS1 on both plasma and urinary ALA and PBG levels. The cERD assay that measures mRNA in exosomes is used to measure serum (or plasma) and urinary 5-aminolevulinate synthase (ALAS-1 mRNA).

[1012] In the asymptomatic high excreters, ALN-AS1 is administered at single doses, e.g., at 0.1, 0.35 1.0, or 2.5 mg/kg, or in repeated weekly doses, e.g., of 1 and 2.5 mg/kg, for several weeks (e.g., for 4 weeks). As a comparison, a control (e.g., placebo) treatment is administered. The safety, pharmacokinetics and effects of the drug on ALA and PBG levels is assessed. A dose of ALN-AS1 that lowers ALA and PBG to within the normal reference range (e.g., a dose that normalizes ALA and/or PBG to levels below 2× the upper reference value) can be selected for subsequent studies, e.g., in AIP patients.

[1013] In the AIP patients, the attack rate and baseline symptoms are assessed during a pre-dosing run-in period (e.g., of 12 weeks). Patients are administered ALN-AS1, e.g., at a dose of 1-2.5 mg/kg weekly. The safety, pharmacokinetics and effects of the drug on ALA and PBG levels are assessed. In addition, changes in attack number, heme use, pain medication use, and hospitalization are monitored.

### EQUIVALENTS

[1014] Those skilled in the art will recognize, or be able to ascertain using no more than routine experimentation, many equivalents to the specific embodiments of the invention described herein. Such equivalents are intended to be encompassed by the following claims.

The application's sequence listing, which the Patent Office published only in electronic form, follows.

SEQUENCE LISTING (5239 sequences)

SEQ ID NO: 1 - DNA, 2407 bp, Homo sapiens
ctgtatattaaggcgccggcgatcgcggcctgaggctgctcccggacaagggcaacgagcgtttcgtttggacttctcgacttgagtgcccgcctccttcgccgccgcctctgcagtcctcagcgcagttatgcccagttcttcccgctgtggggacacgaccacggaggaatccttgcttcagggactcgggaccctgctggaccccttcctcgggtttaggggatgtggggaccaggagaaagtcaggatccctaagagtcttccctgcctggatggatgagtggcttcttctccacctagattctttccacaggagccagcatacttcctgaacatggagagtgttgttcgccgctgcccattcttatcccgagtcccccaggcctttctgcagaaagcaggcaaatctctgttgttctatgcccaaaactgccccaagatgatggaagttggggccaagccagcccctcgggcattgtccactgcagcagtacactaccaacagatcaaagaaacccctccggccagtgagaaagacaaaactgctaaggccaaggtccaacagactcctgatggatcccagcagagtccagatggcacacagcttccgtctggacaccccttgcctgccacaagccagggcactgcaagcaaatgccctttcctggcagcacagatgaatcagagaggcagcagtgtcttctgcaaagccagtcttgagcttcaggaggatgtgcaggaaatgaatgccgtgaggaaagaggttgctgaaacctcagcaggccccagtgtggttagtgtgaaaaccgatggaggggatcccagtggactgctgaagaacttccaggacatcatgcaaaagcaaagaccagaaagagtgtctcatcttcttcaagataacttgccaaaatctgtttccacttttcagtatgatcgtttctttgagaaaaaaattgatgagaaaaagaatgaccacacctatcgagtttttaaaactgtgaaccggcgagcacacatcttccccatggcagatgactattcagactccctcatcaccaaaaagcaagtgtcagtctggtgcagtaatgactacctaggaatgagtcgccacccacgggtgtgtggggcagttatggacactttgaaacaacatggtgctggggcaggtggtactagaaatatttctggaactagtaaattccatgtggacttagagcgggagctggcagacctccatgggaaagatgccgcactcttgttttcctcgtgctttgtggccaatgactcaaccctcttcaccctggctaagatgatgccaggctgtgagatttactctgattctgggaaccatgcctccatgatccaagggattcgaaacagccgagtgccaaagtacatcttccgccacaatgatgtcagccacctcagagaactgctgcaaagatctgacccctcagtccccaagattgtggcatttgaaactgtccattcaatggatggggcggtgtgcccactggaagagctgtgtgatgtggcccatgagtttggagcaatcaccttcgtggatgaggtccacgcagtggggctttatggggctcgaggcggagggattggggatcgggatggagtcatgccaaaaatggacatcatttctggaacacttggcaaagcctttggttgtgttggagggtacatcgccagcacgagttctctgattgacaccgtacggtcctatgctgctggcttcatcttcaccacctctctgccacccatgctgctggctggagccctggagtctgtgcggatcctgaagagcgctgagggacgggtgcttcgccgccagcaccagcgcaacgtcaaactcatgagacagatgctaatggatgccggcctccctgttgtccactgccccagccacatcatccctgtgcgggttgcagatgctgctaaaaacacagaagtctgtgatgaactaatgagcagacataacatctacgtgcaagcaatcaattaccctacggtgccccggggagaagagctcctacggattgcccccacccctcaccacacaccccagatgatgaactacttccttgagaatctgctagtcacatggaagcaagtggggctggaactgaagcctcattcctcagctgagtgcaacttctgcaggaggccactgcattttgaagtgatgagtgaaagagagaagtcctatttctcaggcttgagcaagttggtatctgctcaggcctgagcatgacctcaattatttcacttaaccccaggccattatcatatccagatggtcttcagagttgtctttatatgtgaattaagttatattaaattttaatctatagtaaaaacatagtcctggaaataaattcttgcttaaatggtg

SEQ ID NO: 2 - DNA, 21 bp, Artificial Sequence
  source: /note="Description of Artificial Sequence: Synthetic oligonucleotide"
  source: /note="Description of Combined DNA/RNA Molecule: Synthetic oligonucleotide"
cuccggccagugagaaagatt

SEQ ID NO: 3 - DNA, 21 bp, Artificial Sequence
  source: /note="Description of Artificial Sequence: Synthetic oligonucleotide"
  source: /note="Description of Combined DNA/RNA Molecule: Synthetic oligonucleotide"
ucuuucucacuggccggagtt

SEQ ID NO: 4 - DNA, 21 bp, Artificial Sequence
  source: /note="Description of Artificial Sequence: Synthetic oligonucleotide"
  source: /note="Description of Combined DNA/RNA Molecule: Synthetic oligonucleotide"
uggcagcacagaugaaucatt

SEQ ID NO: 5 - DNA, 21 bp, Artificial Sequence
  source: /note="Description of Artificial Sequence: Synthetic oligonucleotide"
  source: /note="Description of Combined DNA/RNA Molecule: Synthetic oligonucleotide"
ugauucaucugugcugccatt

SEQ ID NO: 6 - DNA, 21 bp, Artificial Sequence
  source: /note="Description of Artificial Sequence: Synthetic oligonucleotide"
  source: /note="Description of Combined DNA/RNA Molecule: Synthetic oligonucleotide"
cagugugguuagugugaaatt

SEQ ID NO: 7 - DNA, 21 bp, Artificial Sequence
  source: /note="Description of Artificial Sequence: Synthetic oligonucleotide"
  source: /note="Description of Combined DNA/RNA Molecule: Synthetic oligonucleotide"
uuucacacuaaccacacugtt

SEQ ID NO: 8 - DNA, 21 bp, Artificial Sequence
  source: /note="Description of Artificial Sequence: Synthetic oligonucleotide"
  source: /note="Description of Combined DNA/RNA Molecule: Synthetic oligonucleotide"
caucaugcaaaagcaaagatt

SEQ ID NO: 9 - DNA, 21 bp, Artificial Sequence
  source: /note="Description of Artificial Sequence: Synthetic oligonucleotide"
  source: /note="Description of Combined DNA/RNA Molecule: Synthetic oligonucleotide"
ucuuugcuuuugcaugaugtt

SEQ ID NO: 10 - DNA, 21 bp, Artificial Sequence
  source: /note="Description of Artificial Sequence: Synthetic oligonucleotide"
  source: /note="Description of Combined DNA/RNA Molecule: Synthetic oligonucleotide"
aaagagugucucaucuucutt

SEQ ID NO: 11 - DNA, 21 bp, Artificial Sequence
  source: /note="Description of Artificial Sequence: Synthetic oligonucleotide"
  source: /note="Description of Combined DNA/RNA Molecule: Synthetic oligonucleotide"
agaagaugagacacucuuutt

SEQ ID NO: 12 - DNA, 21 bp, Artificial Sequence
  source: /note="Description of Artificial Sequence: Synthetic oligonucleotide"
  source: /note="Description of Combined DNA/RNA Molecule: Synthetic oligonucleotide"
aagagugucucaucuucuutt

SEQ ID NO: 13 - DNA, 21 bp, Artificial Sequence
  source: /note="Description of Artificial Sequence: Synthetic oligonucleotide"
  source: /note="Description of Combined DNA/RNA Molecule: Synthetic oligonucleotide"
aagaagaugagacacucuutt

SEQ ID NO: 14 - DNA, 21 bp, Artificial Sequence
  source: /note="Description of Artificial Sequence: Synthetic oligonucleotide"
  source: /note="Description of Combined DNA/RNA Molecule: Synthetic oligonucleotide"
ucuguuuccacuuuucagutt

SEQ ID NO: 15 - DNA, 21 bp, Artificial Sequence
  source: /note="Description of Artificial Sequence: Synthetic oligonucleotide"
  source: /note="Description of Combined DNA/RNA Molecule: Synthetic oligonucleotide"
acugaaaaguggaaacagatt

SEQ ID NO: 16 - DNA, 21 bp, Artificial Sequence
  source: /note="Description of Artificial Sequence: Synthetic oligonucleotide"
  source: /note="Description of Combined DNA/RNA Molecule: Synthetic oligonucleotide"
acuuuucaguaugaucguutt

SEQ ID NO: 17 - DNA, 21 bp, Artificial Sequence
  source: /note="Description of Artificial Sequence: Synthetic oligonucleotide"
  source: /note="Description of Combined DNA/RNA Molecule: Synthetic oligonucleotide"
aacgaucauacugaaaagutt

SEQ ID NO: 18 - DNA, 21 bp, Artificial Sequence
  source: /note="Description of Artificial Sequence: Synthetic oligonucleotide"
  source: /note="Description of Combined DNA/RNA Molecule: Synthetic oligonucleotide"
uuucaguaugaucguuucutt

SEQ ID NO: 19 - DNA, 21 bp, Artificial Sequence
  source: /note="Description of Artificial Sequence: Synthetic oligonucleotide"
  source: /note="Description of Combined DNA/RNA Molecule: Synthetic oligonucleotide"
agaaacgaucauacugaaatt

SEQ ID NO: 20 - DNA, 21 bp, Artificial Sequence
  source: /note="Description of Artificial Sequence: Synthetic oligonucleotide"
  source: /note="Description of Combined DNA/RNA Molecule: Synthetic oligonucleotide"
uucaguaugaucguuucuutt

SEQ ID NO: 21 - DNA, 21 bp, Artificial Sequence
  source: /note="Description of Artificial Sequence: Synthetic oligonucleotide"
  source: /note="Description of Combined DNA/RNA Molecule: Synthetic oligonucleotide"
aagaaacgaucauacugaatt

SEQ ID NO: 22 - DNA, 21 bp, Artificial Sequence
  source: /note="Description of Artificial Sequence: Synthetic oligonucleotide"
  source: /note="Description of Combined DNA/RNA Molecule: Synthetic oligonucleotide"
ucaguaugaucguuucuuutt

SEQ ID NO: 23 - DNA, 21 bp, Artificial Sequence
  source: /note="Description of Artificial Sequence: Synthetic oligonucleotide"
  source: /note="Description of Combined DNA/RNA Molecule: Synthetic oligonucleotide"
aaagaaacgaucauacugatt

SEQ ID NO: 24 - DNA, 21 bp, Artificial Sequence
  source: /note="Description of Artificial Sequence: Synthetic oligonucleotide"
  source: /note="Description of Combined DNA/RNA Molecule: Synthetic oligonucleotide"
uaugaucguuucuuugagatt

SEQ ID NO: 25 - DNA, 21 bp, Artificial Sequence
  source: /note="Description of Artificial Sequence: Synthetic oligonucleotide"
  source: /note="Description of Combined DNA/RNA Molecule: Synthetic oligonucleotide"
ucucaaagaaacgaucauatt

SEQ ID NO: 26 - DNA, 21 bp, Artificial Sequence
  source: /note="Description of Artificial Sequence: Synthetic oligonucleotide"
  source: /note="Description of Combined DNA/RNA Molecule: Synthetic oligonucleotide"
ugaccacaccuaucgaguutt

SEQ ID NO: 27 - DNA, 21 bp, Artificial Sequence
  source: /note="Description of Artificial Sequence: Synthetic oligonucleotide"
  source: /note="Description of Combined DNA/RNA Molecule: Synthetic oligonucleotide"
aacucgauagguguggucatt

SEQ ID NO: 28 - DNA, 21 bp, Artificial Sequence
  source: /note="Description of Artificial Sequence: Synthetic oligonucleotide"
  source: /note="Description of Combined DNA/RNA Molecule: Synthetic oligonucleotide"
accacaccuaucgaguuuutt

SEQ ID NO: 29 - DNA, 21 bp, Artificial Sequence
  source: /note="Description of Artificial Sequence: Synthetic oligonucleotide"
  source: /note="Description of Combined DNA/RNA Molecule: Synthetic oligonucleotide"
aaaacucgauagguguggutt

SEQ ID NO: 30 - DNA, 21 bp, Artificial Sequence
  source: /note="Description of Artificial Sequence: Synthetic oligonucleotide"
  source: /note="Description of Combined DNA/RNA Molecule: Synthetic oligonucleotide"
uggcagaugacuauucagatt

SEQ ID NO: 31 - DNA, 21 bp, Artificial Sequence
  source: /note="Description of Artificial Sequence: Synthetic oligonucleotide"
  source: /note="Description of Combined DNA/RNA Molecule: Synthetic oligonucleotide"
ucugaauagucaucugccatt

SEQ ID NO: 32 - DNA, 21 bp, Artificial Sequence
  source: /note="Description of Artificial Sequence: Synthetic oligonucleotide"
  source: /note="Description of Combined DNA/RNA Molecule: Synthetic oligonucleotide"
ucuggugcaguaaugacuatt

SEQ ID NO: 33 - DNA, 21 bp, Artificial Sequence
  source: /note="Description of Artificial Sequence: Synthetic oligonucleotide"
  source: /note="Description of Combined DNA/RNA Molecule: Synthetic oligonucleotide"
uagucauuacugcaccagatt

SEQ ID NO: 34 - DNA, 21 bp, Artificial Sequence
  source: /note="Description of Artificial Sequence: Synthetic oligonucleotide"
  source: /note="Description of Combined DNA/RNA Molecule: Synthetic oligonucleotide"
uguggggcaguuauggacatt

SEQ ID NO: 35 - DNA, 21 bp, Artificial Sequence
  source: /note="Description of Artificial Sequence: Synthetic oligonucleotide"
  source: /note="Description of Combined DNA/RNA Molecule: Synthetic oligonucleotide"
uguccauaacugccccacatt

SEQ ID NO: 36 - DNA, 21 bp, Artificial Sequence
  source: /note="Description of Artificial Sequence: Synthetic oligonucleotide"
  source: /note="Description of Combined DNA/RNA Molecule: Synthetic oligonucleotide"
uggacacuuugaaacaacatt

SEQ ID NO: 37 - DNA, 21 bp, Artificial Sequence
  source: /note="Description of Artificial Sequence: Synthetic oligonucleotide"
  source: /note="Description of Combined DNA/RNA Molecule: Synthetic oligonucleotide"
uguuguuucaaaguguccatt

SEQ ID NO: 38 - DNA, 21 bp, Artificial Sequence
  source: /note="Description of Artificial Sequence: Synthetic oligonucleotide"
  source: /note="Description of Combined DNA/RNA Molecule: Synthetic oligonucleotide"
auauuucuggaacuaguaatt

SEQ ID NO: 39 - DNA, 21 bp, Artificial Sequence
  source: /note="Description of Artificial Sequence: Synthetic oligonucleotide"
  source: /note="Description of Combined DNA/RNA Molecule: Synthetic oligonucleotide"
uuacuaguuccagaaauautt

SEQ ID NO: 40 - DNA, 21 bp, Artificial Sequence
  source: /note="Description of Artificial Sequence: Synthetic oligonucleotide"
  source: /note="Description of Combined DNA/RNA Molecule: Synthetic oligonucleotide"
auuucuggaacuaguaaautt

SEQ ID NO: 41 - DNA, 21 bp, Artificial Sequence
  source: /note="Description of Artificial Sequence: Synthetic oligonucleotide"
  source: /note="Description of Combined DNA/RNA Molecule: Synthetic oligonucleotide"
auuuacuaguuccagaaautt

SEQ ID NO: 42 - DNA, 21 bp, Artificial Sequence
  source: /note="Description of Artificial Sequence: Synthetic oligonucleotide"
  source: /note="Description of Combined DNA/RNA Molecule: Synthetic oligonucleotide"
uuucuggaacuaguaaauutt

SEQ ID NO: 43 - DNA, 21 bp, Artificial Sequence
  source: /note="Description of Artificial Sequence: Synthetic oligonucleotide"
  source: /note="Description of Combined DNA/RNA Molecule: Synthetic oligonucleotide"
aauuuacuaguuccagaaatt

SEQ ID NO: 44 - DNA, 21 bp, Artificial Sequence
  source: /note="Description of Artificial Sequence: Synthetic oligonucleotide"
  source: /note="Description of Combined DNA/RNA Molecule: Synthetic oligonucleotide"
cuggaacuaguaaauuccatt

SEQ ID NO: 45 - DNA, 21 bp, Artificial Sequence
  source: /note="Description of Artificial Sequence: Synthetic oligonucleotide"
  source: /note="Description of Combined DNA/RNA Molecule: Synthetic oligonucleotide"
uggaauuuacuaguuccagtt

SEQ ID NO: 46 - DNA, 21 bp, Artificial Sequence
  source: /note="Description of Artificial Sequence: Synthetic oligonucleotide"
  source: /note="Description of Combined DNA/RNA Molecule: Synthetic oligonucleotide"
ugugagauuuacucugauutt

SEQ ID NO: 47 - DNA, 21 bp, Artificial Sequence
  source: /note="Description of Artificial Sequence: Synthetic oligonucleotide"
  source: /note="Description of Combined DNA/RNA Molecule: Synthetic oligonucleotide"
aaucagaguaaaucucacatt

SEQ ID NO: 48 - DNA, 21 bp, Artificial Sequence
  source: /note="Description of Artificial Sequence: Synthetic oligonucleotide"
  source: /note="Description of Combined DNA/RNA Molecule: Synthetic oligonucleotide"
auccaagggauucgaaacatt

SEQ ID NO: 49 - DNA, 21 bp, Artificial Sequence
  source: /note="Description of Artificial Sequence: Synthetic oligonucleotide"
  source: /note="Description of Combined DNA/RNA Molecule: Synthetic oligonucleotide"
uguuucgaaucccuuggautt

SEQ ID NO: 50 - DNA, 21 bp, Artificial Sequence
  source: /note="Description of Artificial Sequence: Synthetic oligonucleotide"
  source: /note="Description of Combined DNA/RNA Molecule: Synthetic oligonucleotide"
agccgagugccaaaguacatt

SEQ ID NO: 51 - DNA, 21 bp, Artificial Sequence
  source: /note="Description of Artificial Sequence: Synthetic oligonucleotide"
  source: /note="Description of Combined DNA/RNA Molecule: Synthetic oligonucleotide"
uguacuuuggcacucggcutt

SEQ ID NO: 52 - DNA, 21 bp, Artificial Sequence
  source: /note="Description of Artificial Sequence: Synthetic oligonucleotide"
  source: /note="Description of Combined DNA/RNA Molecule: Synthetic oligonucleotide"
uuugaaacuguccauucaatt

SEQ ID NO: 53 - DNA, 21 bp, Artificial Sequence
  source: /note="Description of Artificial Sequence: Synthetic oligonucleotide"
  source: /note="Description of Combined DNA/RNA Molecule: Synthetic oligonucleotide"
uugaauggacaguuucaaatt

SEQ ID NO: 54 - DNA, 21 bp, Artificial Sequence
  source: /note="Description of Artificial Sequence: Synthetic oligonucleotide"
  source: /note="Description of Combined DNA/RNA Molecule: Synthetic oligonucleotide"
ugauguggcccaugaguuutt

SEQ ID NO: 55 - DNA, 21 bp, Artificial Sequence
  source: /note="Description of Artificial Sequence: Synthetic oligonucleotide"
  source: /note="Description of Combined DNA/RNA Molecule: Synthetic oligonucleotide"
aaacucaugggccacaucatt

SEQ ID NO: 56 - DNA, 21 bp, Artificial Sequence
  source: /note="Description of Artificial Sequence: Synthetic oligonucleotide"
  source: /note="Description of Combined DNA/RNA Molecule: Synthetic oligonucleotide"
gucaugccaaaaauggacatt

SEQ ID NO: 57 - DNA, 21 bp, Artificial Sequence
  source: /note="Description of Artificial Sequence: Synthetic oligonucleotide"
  source: /note="Description of Combined DNA/RNA Molecule: Synthetic oligonucleotide"
uguccauuuuuggcaugactt

SEQ ID NO: 58 - DNA, 21 bp, Artificial Sequence
  source: /note="Description of Artificial Sequence: Synthetic oligonucleotide"
  source: /note="Description of Combined DNA/RNA Molecule: Synthetic oligonucleotide"
ccaaaaauggacaucauuutt

SEQ ID NO: 59 - DNA, 21 bp, Artificial Sequence
  source: /note="Description of Artificial Sequence: Synthetic oligonucleotide"
  source: /note="Description of Combined DNA/RNA Molecule: Synthetic oligonucleotide"
aaaugauguccauuuuuggtt

SEQ ID NO: 60 - DNA, 21 bp, Artificial Sequence
  source: /note="Description of Artificial Sequence: Synthetic oligonucleotide"
  source: /note="Description of Combined DNA/RNA Molecule: Synthetic oligonucleotide"
acgaguucucugauugacatt

SEQ ID NO: 61 - DNA, 21 bp, Artificial Sequence
  source: /note="Description of Artificial Sequence: Synthetic oligonucleotide"
  source: /note="Description of Combined DNA/RNA Molecule: Synthetic oligonucleotide"
ugucaaucagagaacucgutt

SEQ ID NO: 62 - DNA, 21 bp, Artificial Sequence
  source: /note="Description of Artificial Sequence: Synthetic oligonucleotide"
  source: /note="Description of Combined DNA/RNA Molecule: Synthetic oligonucleotide"
aagucugugaugaacuaautt

SEQ ID NO: 63 - DNA, 21 bp, Artificial Sequence
  source: /note="Description of Artificial Sequence: Synthetic oligonucleotide"
  source: /note="Description of Combined DNA/RNA Molecule: Synthetic oligonucleotide"
auuaguucaucacagacuutt

SEQ ID NO: 64 - DNA, 21 bp, Artificial Sequence
  source: /note="Description of Artificial Sequence: Synthetic oligonucleotide"
  source: /note="Description of Combined DNA/RNA Molecule: Synthetic oligonucleotide"
ugugaugaacuaaugagcatt

SEQ ID NO: 65 - DNA, 21 bp, Artificial Sequence
  source: /note="Description of Artificial Sequence: Synthetic oligonucleotide"
  source: /note="Description of Combined DNA/RNA Molecule: Synthetic oligonucleotide"
ugcucauuaguucaucacatt

SEQ ID NO: 66 - DNA, 21 bp, Artificial Sequence
  source: /note="Description of Artificial Sequence: Synthetic oligonucleotide"
  source: /note="Description of Combined DNA/RNA Molecule: Synthetic oligonucleotide"
uaaugagcagacauaacautt

SEQ ID NO: 67 - DNA, 21 bp, Artificial Sequence
  source: /note="Description of Artificial Sequence: Synthetic oligonucleotide"
  source: /note="Description of Combined DNA/RNA Molecule: Synthetic oligonucleotide"
auguuaugucugcucauuatt

SEQ ID NO: 68 - DNA, 21 bp, Artificial Sequence
  source: /note="Description of Artificial Sequence: Synthetic oligonucleotide"
  source: /note="Description of Combined DNA/RNA Molecule: Synthetic oligonucleotide"
uuugaagugaugagugaaatt

SEQ ID NO: 69 - DNA, 21 bp, Artificial Sequence
  source: /note="Description of Artificial Sequence: Synthetic oligonucleotide"
  source: /note="Description of Combined DNA/RNA Molecule: Synthetic oligonucleotide"
uuucacucaucacuucaaatt

SEQ ID NO: 70 - DNA, 21 bp, Artificial Sequence
  source: /note="Description of Artificial Sequence: Synthetic oligonucleotide"
  source: /note="Description of Combined DNA/RNA Molecule: Synthetic oligonucleotide"
aggcuugagcaaguugguatt

SEQ ID NO: 71 - DNA, 21 bp, Artificial Sequence
  source: /note="Description of Artificial Sequence: Synthetic oligonucleotide"
  source: /note="Description of Combined DNA/RNA Molecule: Synthetic oligonucleotide"
uaccaacuugcucaagccutt

SEQ ID NO: 72 - DNA, 21 bp, Artificial Sequence
  source: /note="Description of Artificial Sequence: Synthetic oligonucleotide"
  source: /note="Description of Combined DNA/RNA Molecule: Synthetic oligonucleotide"
ucuucagaguugucuuuautt

SEQ ID NO: 73 - DNA, 21 bp, Artificial Sequence
  source: /note="Description of Artificial Sequence: Synthetic oligonucleotide"
  source: /note="Description of Combined DNA/RNA Molecule: Synthetic oligonucleotide"
auaaagacaacucugaagatt

SEQ ID NO: 74 - DNA, 21 bp, Artificial Sequence
  source: /note="Description of Artificial Sequence: Synthetic oligonucleotide"
  source: /note="Description of Combined DNA/RNA Molecule: Synthetic oligonucleotide"
cagaguugucuuuauaugutt

SEQ ID NO: 75 - DNA, 21 bp, Artificial Sequence
  source: /note="Description of Artificial Sequence: Synthetic oligonucleotide"
  source: /note="Description of Combined DNA/RNA Molecule: Synthetic oligonucleotide"
acauauaaagacaacucugtt

SEQ ID NO: 76 - DNA, 21 bp, Artificial Sequence
  source: /note="Description of Artificial Sequence: Synthetic oligonucleotide"
  source: /note="Description of Combined DNA/RNA Molecule: Synthetic oligonucleotide"
gaguugucuuuauaugugatt

SEQ ID NO: 77 - DNA, 21 bp, Artificial Sequence
  source: /note="Description of Artificial Sequence: Synthetic oligonucleotide"
  source: /note="Description of Combined DNA/RNA Molecule: Synthetic oligonucleotide"
ucacauauaaagacaacuctt

SEQ ID NO: 78 - DNA, 21 bp, Artificial Sequence
  source: /note="Description of Artificial Sequence: Synthetic oligonucleotide"
  source: /note="Description of Combined DNA/RNA Molecule: Synthetic oligonucleotide"
aguugucuuuauaugugaatt

SEQ ID NO: 79 - DNA, 21 bp, Artificial Sequence
  source: /note="Description of Artificial Sequence: Synthetic oligonucleotide"
  source: /note="Description of Combined DNA/RNA Molecule: Synthetic oligonucleotide"
uucacauauaaagacaacutt

SEQ ID NO: 80 - DNA, 21 bp, Artificial Sequence
  source: /note="Description of Artificial Sequence: Synthetic oligonucleotide"
  source: /note="Description of Combined DNA/RNA Molecule: Synthetic oligonucleotide"
uuauauuaaauuuuaaucutt

SEQ ID NO: 81 - DNA, 21 bp, Artificial Sequence
  source: /note="Description of Artificial Sequence: Synthetic oligonucleotide"
  source: /note="Description of Combined DNA/RNA Molecule: Synthetic oligonucleotide"
agauuaaaauuuaauauaatt

SEQ ID NO: 82 - DNA, 21 bp, Artificial Sequence
  source: /note="Description of Artificial Sequence: Synthetic oligonucleotide"
  source: /note="Description of Combined DNA/RNA Molecule: Synthetic oligonucleotide"
aauuuuaaucuauaguaaatt

SEQ ID NO: 83 - DNA, 21 bp, Artificial Sequence
  source: /note="Description of Artificial Sequence: Synthetic oligonucleotide"
  source: /note="Description of Combined DNA/RNA Molecule: Synthetic oligonucleotide"
uuuacuauagauuaaaauutt

SEQ ID NO: 84 - DNA, 21 bp, Artificial Sequence
  source: /note="Description of Artificial Sequence: Synthetic oligonucleotide"
  source: /note="Description of Combined DNA/RNA Molecule: Synthetic oligonucleotide"
auuuuaaucuauaguaaaatt

SEQ ID NO: 85 - DNA, 21 bp, Artificial Sequence
  source: /note="Description of Artificial Sequence: Synthetic oligonucleotide"
  source: /note="Description of Combined DNA/RNA Molecule: Synthetic oligonucleotide"
uuuuacuauagauuaaaautt

SEQ ID NO: 86 - DNA, 21 bp, Artificial Sequence
  source: /note="Description of Artificial Sequence: Synthetic oligonucleotide"
  source: /note="Description of Combined DNA/RNA Molecule: Synthetic oligonucleotide"
aguccuggaaauaaauucutt

SEQ ID NO: 87 - DNA, 21 bp, Artificial Sequence
  source: /note="Description of Artificial Sequence: Synthetic oligonucleotide"
  source: /note="Description of Combined DNA/RNA Molecule: Synthetic oligonucleotide"
agaauuuauuuccaggacutt

SEQ ID NO: 88 - DNA, 21 bp, Artificial Sequence
  source: /note="Description of Artificial Sequence: Synthetic oligonucleotide"
  source: /note="Description of Combined DNA/RNA Molecule: Synthetic oligonucleotide"
cugcccauucuuaucccgatt

SEQ ID NO: 89 - DNA, 21 bp, Artificial Sequence
  source: /note="Description of Artificial Sequence: Synthetic oligonucleotide"
  source: /note="Description of Combined DNA/RNA Molecule: Synthetic oligonucleotide"
ucgggauaagaaugggcagtt

SEQ ID NO: 90 - DNA, 21 bp, Artificial Sequence
  source: /note="Description of Artificial Sequence: Synthetic oligonucleotide"
  source: /note="Description of Combined DNA/RNA Molecule: Synthetic oligonucleotide"
ccagugugguuagugugaatt

SEQ ID NO: 91 - DNA, 21 bp, Artificial Sequence
  source: /note="Description of Artificial Sequence: Synthetic oligonucleotide"
  source: /note="Description of Combined DNA/RNA Molecule: Synthetic oligonucleotide"
uucacacuaaccacacuggtt

SEQ ID NO: 92 - DNA, 21 bp, Artificial Sequence
  source: /note="Description of Artificial Sequence: Synthetic oligonucleotide"
  source: /note="Description of Combined DNA/RNA Molecule: Synthetic oligonucleotide"
gucuggugcaguaaugacutt

SEQ ID NO: 93 - DNA, 21 bp, Artificial Sequence
  source: /note="Description of Artificial Sequence: Synthetic oligonucleotide"
  source: /note="Description of Combined DNA/RNA Molecule: Synthetic oligonucleotide"
agucauuacugcaccagactt

SEQ ID NO: 94 - DNA, 21 bp, Artificial Sequence
  source: /note="Description of Artificial Sequence: Synthetic oligonucleotide"
  source: /note="Description of Combined DNA/RNA Molecule: Synthetic oligonucleotide"
gcacucuuguuuuccucgutt

SEQ ID NO: 95 - DNA, 21 bp, Artificial Sequence
  source: /note="Description of Artificial Sequence: Synthetic oligonucleotide"
  source: /note="Description of Combined DNA/RNA Molecule: Synthetic oligonucleotide"
acgaggaaaacaagagugctt

SEQ ID NO: 96 - DNA, 21 bp, Artificial Sequence
  source: /note="Description of Artificial Sequence: Synthetic oligonucleotide"
  source: /note="Description of Combined DNA/RNA Molecule: Synthetic oligonucleotide"
gaguuuggagcaaucaccutt

SEQ ID NO: 97 - DNA, 21 bp, Artificial Sequence
  source: /note="Description of Artificial Sequence: Synthetic oligonucleotide"
  source: /note="Description of Combined DNA/RNA Molecule: Synthetic oligonucleotide"
aggugauugcuccaaacuctt

SEQ ID NO: 98 - DNA, 21 bp, Artificial Sequence
  source: /note="Description of Artificial Sequence: Synthetic oligonucleotide"
  source: /note="Description of Combined DNA/RNA Molecule: Synthetic oligonucleotide"
ggcuugagcaaguugguautt

SEQ ID NO: 99 - DNA, 21 bp, Artificial Sequence
  source: /note="Description of Artificial Sequence: Synthetic oligonucleotide"
  source: /note="Description of Combined DNA/RNA Molecule: Synthetic oligonucleotide"
auaccaacuugcucaagcctt

SEQ ID NO: 100 - DNA, 21 bp, Artificial Sequence
  source: /note="Description of Artificial Sequence: Synthetic oligonucleotide"
  source: /note="Description of Combined DNA/RNA Molecule: Synthetic oligonucleotide"
ggcaaaucucuguuguucutt

SEQ ID NO: 101 - DNA, 21 bp, Artificial Sequence
  source: /note="Description of Artificial Sequence: Synthetic oligonucleotide"
  source: /note="Description of Combined DNA/RNA Molecule: Synthetic oligonucleotide"
agaacaacagagauuugcctt

SEQ ID NO: 102 - DNA, 21 bp, Artificial Sequence
  source: /note="Description of Artificial Sequence: Synthetic oligonucleotide"
  source: /note="Description of Combined DNA/RNA Molecule: Synthetic oligonucleotide"
ggcaaaucucuguuguucutt

SEQ ID NO: 103 - DNA, 21 bp, Artificial Sequence
  source: /note="Description of Artificial Sequence: Synthetic oligonucleotide"
  source: /note="Description of Combined DNA/RNA Molecule: Synthetic oligonucleotide"
agaacaacagagauuugcctt

SEQ ID NO: 104 - DNA, 21 bp, Artificial Sequence
  source: /note="Description of Artificial Sequence: Synthetic oligonucleotide"
  source: /note="Description of Combined DNA/RNA Molecule: Synthetic oligonucleotide"
caaagaccagaaagagugutt

SEQ ID NO: 105 - DNA, 21 bp, Artificial Sequence
  source: /note="Description of Artificial Sequence: Synthetic oligonucleotide"
  source: /note="Description of Combined DNA/RNA Molecule: Synthetic oligonucleotide"
acacucuuucuggucuuugtt

SEQ ID NO: 106 - DNA, 21 bp, Artificial Sequence
  source: /note="Description of Artificial Sequence: Synthetic oligonucleotide"
  source: /note="Description of Combined DNA/RNA Molecule: Synthetic oligonucleotide"
ggugcaguaaugacuaccutt

SEQ ID NO: 107 - DNA, 21 bp, Artificial Sequence
  source: /note="Description of Artificial Sequence: Synthetic oligonucleotide"
  source: /note="Description of Combined DNA/RNA Molecule: Synthetic oligonucleotide"
agguagucauuacugcacctt

SEQ ID NO: 108 - DNA, 21 bp, Artificial Sequence
  source: /note="Description of Artificial Sequence: Synthetic oligonucleotide"
  source: /note="Description of Combined DNA/RNA Molecule: Synthetic oligonucleotide"
cuuguuuuccucgugcuuutt

SEQ ID NO: 109 - DNA, 21 bp, Artificial Sequence
  source: /note="Description of Artificial Sequence: Synthetic oligonucleotide"
  source: /note="Description of Combined DNA/RNA Molecule: Synthetic oligonucleotide"
aaagcacgaggaaaacaagtt

SEQ ID NO: 110 - DNA, 21 bp, Artificial Sequence
  source: /note="Description of Artificial Sequence: Synthetic oligonucleotide"
  source: /note="Description of Combined DNA/RNA Molecule: Synthetic oligonucleotide"
ggggaucgggauggagucatt

SEQ ID NO: 111 - DNA, 21 bp, Artificial Sequence
  source: /note="Description of Artificial Sequence: Synthetic oligonucleotide"
  source: /note="Description of Combined DNA/RNA Molecule: Synthetic oligonucleotide"
ugacuccaucccgaucccctt

SEQ ID NO: 112 - DNA, 21 bp, Artificial Sequence
  source: /note="Description of Artificial Sequence: Synthetic oligonucleotide"
  source: /note="Description of Combined DNA/RNA Molecule: Synthetic oligonucleotide"
cuugagcaaguugguaucutt

SEQ ID NO: 113 - DNA, 21 bp, Artificial Sequence
  source: /note="Description of Artificial Sequence: Synthetic oligonucleotide"
  source: /note="Description of Combined DNA/RNA Molecule: Synthetic oligonucleotide"
agauaccaacuugcucaagtt

SEQ ID NO: 114 - DNA, 21 bp, Artificial Sequence
  source: /note="Description of Artificial Sequence: Synthetic oligonucleotide"
  source: /note="Description of Combined DNA/RNA Molecule: Synthetic oligonucleotide"
ccccaagaugauggaaguutt

SEQ ID NO: 115 - DNA, 21 bp, Artificial Sequence
  source: /note="Description of Artificial Sequence: Synthetic oligonucleotide"
  source: /note="Description of Combined DNA/RNA Molecule: Synthetic oligonucleotide"
aacuuccaucaucuuggggtt

SEQ ID NO: 116 - DNA, 21 bp, Artificial Sequence
  source: /note="Description of Artificial Sequence: Synthetic oligonucleotide"
  source: /note="Description of Combined DNA/RNA Molecule: Synthetic oligonucleotide"
ccccaagaugauggaaguutt

SEQ ID NO: 117 - DNA, 21 bp, Artificial Sequence
  source: /note="Description of Artificial Sequence: Synthetic oligonucleotide"
  source: /note="Description of Combined DNA/RNA Molecule: Synthetic oligonucleotide"
aacuuccaucaucuuggggtt

SEQ ID NO: 118 - DNA, 21 bp, Artificial Sequence
  source: /note="Description of Artificial Sequence: Synthetic oligonucleotide"
  source: /note="Description of Combined DNA/RNA Molecule: Synthetic oligonucleotide"
cucaucuucuucaagauaatt

SEQ ID NO: 119 - DNA, 21 bp, Artificial Sequence
  source: /note="Description of Artificial Sequence: Synthetic oligonucleotide"
  source: /note="Description of Combined DNA/RNA Molecule: Synthetic oligonucleotide"
uuaucuugaagaagaugagtt

SEQ ID NO: 120 - DNA, 21 bp, Artificial Sequence
  source: /note="Description of Artificial Sequence: Synthetic oligonucleotide"
  source: /note="Description of Combined DNA/RNA Molecule: Synthetic oligonucleotide"
ggggcaguuauggacacuutt

SEQ ID NO: 121 - DNA, 21 bp, Artificial Sequence
  source: /note="Description of Artificial Sequence: Synthetic oligonucleotide"
  source: /note="Description of Combined DNA/RNA Molecule: Synthetic oligonucleotide"
aaguguccauaacugcccctt

SEQ ID NO: 122 - DNA, 21 bp, Artificial Sequence
  source: /note="Description of Artificial Sequence: Synthetic oligonucleotide"
  source: /note="Description of Combined DNA/RNA Molecule: Synthetic oligonucleotide"
gaugccaggcugugagauutt

SEQ ID NO: 123 - DNA, 21 bp, Artificial Sequence
  source: /note="Description of Artificial Sequence: Synthetic oligonucleotide"
  source: /note="Description of Combined DNA/RNA Molecule: Synthetic oligonucleotide"
aaucucacagccuggcauctt

SEQ ID NO: 124 - DNA, 21 bp, Artificial Sequence
  source: /note="Description of Artificial Sequence: Synthetic oligonucleotide"
  source: /note="Description of Combined DNA/RNA Molecule: Synthetic oligonucleotide"
gagacagaugcuaauggautt

SEQ ID NO: 125 - DNA, 21 bp, Artificial Sequence
  source: /note="Description of Artificial Sequence: Synthetic oligonucleotide"
  source: /note="Description of Combined DNA/RNA Molecule: Synthetic oligonucleotide"
auccauuagcaucugucuctt

SEQ ID NO: 126 - DNA, 21 bp, Artificial Sequence
  source: /note="Description of Artificial Sequence: Synthetic oligonucleotide"
  source: /note="Description of Combined DNA/RNA Molecule: Synthetic oligonucleotide"
ccccaggccauuaucauautt

SEQ ID NO: 127 - DNA, 21 bp, Artificial Sequence
  source: /note="Description of Artificial Sequence: Synthetic oligonucleotide"
  source: /note="Description of Combined DNA/RNA Molecule: Synthetic oligonucleotide"
auaugauaauggccuggggtt

SEQ ID NO: 128 - DNA, 21 bp, Artificial Sequence
  source: /note="Description of Artificial Sequence: Synthetic oligonucleotide"
  source: /note="Description of Combined DNA/RNA Molecule: Synthetic oligonucleotide"
cagcaguacacuaccaacatt

SEQ ID NO: 129 - DNA, 21 bp, Artificial Sequence
  source: /note="Description of Artificial Sequence: Synthetic oligonucleotide"
  source: /note="Description of Combined DNA/RNA Molecule: Synthetic oligonucleotide"
uguugguaguguacugcugtt

SEQ ID NO: 130 - DNA, 21 bp, Artificial Sequence
  source: /note="Description of Artificial Sequence: Synthetic oligonucleotide"
  source: /note="Description of Combined DNA/RNA Molecule: Synthetic oligonucleotide"
cagcaguacacuaccaacatt

SEQ ID NO: 131 - DNA, 21 bp, Artificial Sequence
  source: /note="Description of Artificial Sequence: Synthetic oligonucleotide"
  source: /note="Description of Combined DNA/RNA Molecule: Synthetic oligonucleotide"
uguugguaguguacugcugtt

SEQ ID NO: 132 - DNA, 21 bp, Artificial Sequence
  source: /note="Description of Artificial Sequence: Synthetic oligonucleotide"
  source: /note="Description of Combined DNA/RNA Molecule: Synthetic oligonucleotide"
cuguuuccacuuuucaguatt

SEQ ID NO: 133 - DNA, 21 bp, Artificial Sequence
  source: /note="Description of Artificial Sequence: Synthetic oligonucleotide"
  source: /note="Description of Combined DNA/RNA Molecule: Synthetic oligonucleotide"
uacugaaaaguggaaacagtt

SEQ ID NO: 134 - DNA, 21 bp, Artificial Sequence
  source: /note="Description of Artificial Sequence: Synthetic oligonucleotide"
  source: /note="Description of Combined DNA/RNA Molecule: Synthetic oligonucleotide"
ggacacuuugaaacaacautt

SEQ ID NO: 135 - DNA, 21 bp, Artificial Sequence
  source: /note="Description of Artificial Sequence: Synthetic oligonucleotide"
  source: /note="Description of Combined DNA/RNA Molecule: Synthetic oligonucleotide"
auguuguuucaaagugucctt

SEQ ID NO: 136 - DNA, 21 bp, Artificial Sequence
  source: /note="Description of Artificial Sequence: Synthetic oligonucleotide"
  source: /note="Description of Combined DNA/RNA Molecule: Synthetic oligonucleotide"
cugugagauuuacucugautt

SEQ ID NO: 137 - DNA, 21 bp, Artificial Sequence
  source: /note="Description of Artificial Sequence: Synthetic oligonucleotide"
  source: /note="Description of Combined DNA/RNA Molecule: Synthetic oligonucleotide"
aucagaguaaaucucacagtt

SEQ ID NO: 138 - DNA, 21 bp, Artificial Sequence
  source: /note="Description of Artificial Sequence: Synthetic oligonucleotide"
  source: /note="Description of Combined DNA/RNA Molecule: Synthetic oligonucleotide"
cccugugcggguugcagautt

SEQ ID NO: 139 - DNA, 21 bp, Artificial Sequence
  source: /note="Description of Artificial Sequence: Synthetic oligonucleotide"
  source: /note="Description of Combined DNA/RNA Molecule: Synthetic oligonucleotide"
aucugcaacccgcacagggtt

SEQ ID NO: 140 - DNA, 21 bp, Artificial Sequence
  source: /note="Description of Artificial Sequence: Synthetic oligonucleotide"
  source: /note="Description of Combined DNA/RNA Molecule: Synthetic oligonucleotide"
gucuucagaguugucuuuatt

SEQ ID NO: 141 - DNA, 21 bp, Artificial Sequence
  source: /note="Description of Artificial Sequence: Synthetic oligonucleotide"
  source: /note="Description of Combined DNA/RNA Molecule: Synthetic oligonucleotide"
uaaagacaacucugaagactt

SEQ ID NO: 142 - DNA, 21 bp, Artificial Sequence
  source: /note="Description of Artificial Sequence: Synthetic oligonucleotide"
  source: /note="Description of Combined DNA/RNA Molecule: Synthetic oligonucleotide"
cacugcaagcaaaugcccutt

SEQ ID NO: 143 - DNA, 21 bp, Artificial Sequence
  source: /note="Description of Artificial Sequence: Synthetic oligonucleotide"
  source: /note="Description of Combined DNA/RNA Molecule: Synthetic oligonucleotide"
agggcauuugcuugcagugtt

SEQ ID NO: 144 - DNA, 21 bp, Artificial Sequence
  source: /note="Description of Artificial Sequence: Synthetic oligonucleotide"
  source: /note="Description of Combined DNA/RNA Molecule: Synthetic oligonucleotide"
cacuuuucaguaugaucgutt

SEQ ID NO: 145 - DNA, 21 bp, Artificial Sequence
  source: /note="Description of Artificial Sequence: Synthetic oligonucleotide"
  source: /note="Description of Combined DNA/RNA Molecule: Synthetic oligonucleotide"
acgaucauacugaaaagugtt

SEQ ID NO: 146 - DNA, 21 bp, Artificial Sequence
  source: /note="Description of Artificial Sequence: Synthetic oligonucleotide"
  source: /note="Description of Combined DNA/RNA Molecule: Synthetic oligonucleotide"
ggggcaggugguacuagaatt

SEQ ID NO: 147 - DNA, 21 bp, Artificial Sequence
  source: /note="Description of Artificial Sequence: Synthetic oligonucleotide"
  source: /note="Description of Combined DNA/RNA Molecule: Synthetic oligonucleotide"
uucuaguaccaccugcccctt

SEQ ID NO: 148 - DNA, 21 bp, Artificial Sequence
  source: /note="Description of Artificial Sequence: Synthetic oligonucleotide"
  source: /note="Description of Combined DNA/RNA Molecule: Synthetic oligonucleotide"
ggaaccaugccuccaugautt

SEQ ID NO: 149 - DNA, 21 bp, Artificial Sequence
  source: /note="Description of Artificial Sequence: Synthetic oligonucleotide"
  source: /note="Description of Combined DNA/RNA Molecule: Synthetic oligonucleotide"
aucauggaggcaugguucctt

SEQ ID NO: 150 - DNA, 21 bp, Artificial Sequence
  source: /note="Description of Artificial Sequence: Synthetic oligonucleotide"
  source: /note="Description of Combined DNA/RNA Molecule: Synthetic oligonucleotide"
gucugugaugaacuaaugatt

SEQ ID NO: 151 - DNA, 21 bp, Artificial Sequence
  source: /note="Description of Artificial Sequence: Synthetic oligonucleotide"
  source: /note="Description of Combined DNA/RNA Molecule: Synthetic oligonucleotide"
ucauuaguucaucacagactt

SEQ ID NO: 152 - DNA, 21 bp, Artificial Sequence
  source: /note="Description of Artificial Sequence: Synthetic oligonucleotide"
  source: /note="Description of Combined DNA/RNA Molecule: Synthetic oligonucleotide"
guugucuuuauaugugaautt

SEQ ID NO: 153 - DNA, 21 bp, Artificial Sequence
  source: /note="Description of Artificial Sequence: Synthetic oligonucleotide"
  source: /note="Description of Combined DNA/RNA Molecule: Synthetic oligonucleotide"
auucacauauaaagacaactt

SEQ ID NO: 154 - DNA, 21 bp, Artificial Sequence
  source: /note="Description of Artificial Sequence: Synthetic oligonucleotide"
  source: /note="Description of Combined DNA/RNA Molecule: Synthetic oligonucleotide"
gcagcacagaugaaucagatt

SEQ ID NO: 155 - DNA, 21 bp, Artificial Sequence
  source: /note="Description of Artificial Sequence: Synthetic oligonucleotide"
  source: /note="Description of Combined DNA/RNA Molecule: Synthetic oligonucleotide"
ucugauucaucugugcugctt

SEQ ID NO: 156 - DNA, 21 bp, Artificial Sequence
  source: /note="Description of Artificial Sequence: Synthetic oligonucleotide"
  source: /note="Description of Combined DNA/RNA Molecule: Synthetic oligonucleotide"
cuuuucaguaugaucguuutt

SEQ ID NO: 157 - DNA, 21 bp, Artificial Sequence
  source: /note="Description of Artificial Sequence: Synthetic oligonucleotide"
  source: /note="Description of Combined DNA/RNA Molecule: Synthetic oligonucleotide"
aaacgaucauacugaaaagtt

SEQ ID NO: 158 - DNA, 21 bp, Artificial Sequence
  source: /note="Description of Artificial Sequence: Synthetic oligonucleotide"
  source: /note="Description of Combined DNA/RNA Molecule: Synthetic oligonucleotide"
gggcaggugguacuagaaatt

SEQ ID NO: 159 - DNA, 21 bp, Artificial Sequence
  source: /note="Description of Artificial Sequence: Synthetic oligonucleotide"
  source: /note="Description of Combined DNA/RNA Molecule: Synthetic oligonucleotide"
uuucuaguaccaccugccctt

SEQ ID NO: 160 - DNA, 21 bp, Artificial Sequence
  source: /note="Description of Artificial Sequence: Synthetic oligonucleotide"
  source: /note="Description of Combined DNA/RNA Molecule: Synthetic oligonucleotide"
guccccaagauuguggcautt

SEQ ID NO: 161 - DNA, 21 bp, Artificial Sequence
  source: /note="Description of Artificial Sequence: Synthetic oligonucleotide"
  source: /note="Description of Combined DNA/RNA Molecule: Synthetic oligonucleotide"
augccacaaucuuggggactt

SEQ ID NO: 162 - DNA, 21 bp, Artificial Sequence
  source: /note="Description of Artificial Sequence: Synthetic oligonucleotide"
  source: /note="Description of Combined DNA/RNA Molecule: Synthetic oligonucleotide"
cuaaugagcagacauaacatt

SEQ ID NO: 163 - DNA, 21 bp, Artificial Sequence
  source: /note="Description of Artificial Sequence: Synthetic oligonucleotide"
  source: /note="Description of Combined DNA/RNA Molecule: Synthetic oligonucleotide"
uguuaugucugcucauuagtt

SEQ ID NO: 164 - DNA, 21 bp, Artificial Sequence
  source: /note="Description of Artificial Sequence: Synthetic oligonucleotide"
  source: /note="Description of Combined DNA/RNA Molecule: Synthetic oligonucleotide"
gccccagugugguuagugutt

SEQ ID NO: 165 - DNA, 21 bp, Artificial Sequence
  source: /note="Description of Artificial Sequence: Synthetic oligonucleotide"
  source: /note="Description of Combined DNA/RNA Molecule: Synthetic oligonucleotide"
acacuaaccacacuggggctt

SEQ ID NO: 166 - DNA, 21 bp, Artificial Sequence
  source: /note="Description of Artificial Sequence: Synthetic oligonucleotide"
  source: /note="Description of Combined DNA/RNA Molecule: Synthetic oligonucleotide"
gaucguuucuuugagaaaatt

SEQ ID NO: 167 - DNA, 21 bp, Artificial Sequence
  source: /note="Description of Artificial Sequence: Synthetic oligonucleotide"
  source: /note="Description of Combined DNA/RNA Molecule: Synthetic oligonucleotide"
uuuucucaaagaaacgauctt

SEQ ID NO: 168 - DNA, 21 bp, Artificial Sequence
  source: /note="Description of Artificial Sequence: Synthetic oligonucleotide"
  source: /note="Description of Combined DNA/RNA Molecule: Synthetic oligonucleotide"
ggcaggugguacuagaaautt

SEQ ID NO: 169 - DNA, 21 bp, Artificial Sequence
  source: /note="Description of Artificial Sequence: Synthetic oligonucleotide"
  source: /note="Description of Combined DNA/RNA Molecule: Synthetic oligonucleotide"
auuucuaguaccaccugcctt

SEQ ID NO: 170 - DNA, 21 bp, Artificial Sequence
  source: /note="Description of Artificial Sequence: Synthetic oligonucleotide"
  source: /note="Description of Combined DNA/RNA Molecule: Synthetic oligonucleotide"
gugauguggcccaugaguutt

SEQ ID NO: 171 - DNA, 21 bp, Artificial Sequence
  source: /note="Description of Artificial Sequence: Synthetic oligonucleotide"
  source: /note="Description of Combined DNA/RNA Molecule: Synthetic oligonucleotide"
aacucaugggccacaucactt

SEQ ID NO: 172 - DNA, 21 bp, Artificial Sequence
  source: /note="Description of Artificial Sequence: Synthetic oligonucleotide"
  source: /note="Description of Combined DNA/RNA Molecule: Synthetic oligonucleotide"
caagcaaucaauuacccuatt

SEQ ID NO: 173 - DNA, 21 bp, Artificial Sequence
  source: /note="Description of Artificial Sequence: Synthetic oligonucleotide"
  source: /note="Description of Combined DNA/RNA Molecule: Synthetic oligonucleotide"
uaggguaauugauugcuugtt

SEQ ID NO: 174 - DNA, 21 bp, Artificial Sequence
  source: /note="Description of Artificial Sequence: Synthetic oligonucleotide"
  source: /note="Description of Combined DNA/RNA Molecule: Synthetic oligonucleotide"
cccagugugguuagugugatt

SEQ ID NO: 175 - DNA, 21 bp, Artificial Sequence
  source: /note="Description of Artificial Sequence: Synthetic oligonucleotide"
  source: /note="Description of Combined DNA/RNA Molecule: Synthetic oligonucleotide"
ucacacuaaccacacugggtt

SEQ ID NO: 176 - DNA, 21 bp, Artificial Sequence
  source: /note="Description of Artificial Sequence: Synthetic oligonucleotide"
  source: /note="Description of Combined DNA/RNA Molecule: Synthetic oligonucleotide"
gaccacaccuaucgaguuutt

SEQ ID NO: 177 - DNA, 21 bp, Artificial Sequence
  source: /note="Description of Artificial Sequence: Synthetic oligonucleotide"
  source: /note="Description of Combined DNA/RNA Molecule: Synthetic oligonucleotide"
aaacucgauaggugugguctt

SEQ ID NO: 178 - DNA, 21 bp, Artificial Sequence
  source: /note="Description of Artificial Sequence: Synthetic oligonucleotide"
  source: /note="Description of Combined DNA/RNA Molecule: Synthetic oligonucleotide"
gaacuaguaaauuccaugutt

SEQ ID NO: 179 - DNA, 21 bp, Artificial Sequence
  source: /note="Description of Artificial Sequence: Synthetic oligonucleotide"
  source: /note="Description of Combined DNA/RNA Molecule: Synthetic oligonucleotide"
acauggaauuuacuaguuctt

SEQ ID NO: 180 - DNA, 21 bp, Artificial Sequence
  source: /note="Description of Artificial Sequence: Synthetic oligonucleotide"
  source: /note="Description of Combined DNA/RNA Molecule: Synthetic oligonucleotide"
caugaguuuggagcaaucatt

SEQ ID NO: 181 - DNA, 21 bp, Artificial Sequence
  source: /note="Description of Artificial Sequence: Synthetic oligonucleotide"
  source: /note="Description of Combined DNA/RNA Molecule: Synthetic oligonucleotide"
ugauugcuccaaacucaugtt

SEQ ID NO: 182 - DNA, 21 bp, Artificial Sequence
  source: /note="Description of Artificial Sequence: Synthetic oligonucleotide"
  source: /note="Description of Combined DNA/RNA Molecule: Synthetic oligonucleotide"
ccccagaugaugaacuacutt

SEQ ID NO: 183 - DNA, 21 bp, Artificial Sequence
  source: /note="Description of Artificial Sequence: Synthetic oligonucleotide"
  source: /note="Description of Combined DNA/RNA Molecule: Synthetic oligonucleotide"
aguaguucaucaucuggggtt

SEQ ID NO: 184 - DNA, 21 bp, Artificial Sequence
  source: /note="Description of Artificial Sequence: Synthetic oligonucleotide"
  source: /note="Description of Combined DNA/RNA Molecule: Synthetic oligonucleotide"
gcccauucuuaucccgagutt

SEQ ID NO: 185 - DNA, 21 bp, Artificial Sequence
  source: /note="Description of Artificial Sequence: Synthetic oligonucleotide"
  source: /note="Description of Combined DNA/RNA Molecule: Synthetic oligonucleotide"
acucgggauaagaaugggctt

SEQ ID NO: 186 - DNA, 21 bp, Artificial Sequence
  source: /note="Description of Artificial Sequence: Synthetic oligonucleotide"
  source: /note="Description of Combined DNA/RNA Molecule: Synthetic oligonucleotide"
ccuccaugauccaagggautt

SEQ ID NO: 187 - DNA, 21 bp, Artificial Sequence
  source: /note="Description of Artificial Sequence: Synthetic oligonucleotide"
  source: /note="Description of Combined DNA/RNA Molecule: Synthetic oligonucleotide"
aucccuuggaucauggaggtt

SEQ ID NO: 188 - DNA, 21 bp, Artificial Sequence
  source: /note="Description of Artificial Sequence: Synthetic oligonucleotide"
  source: /note="Description of Combined DNA/RNA Molecule: Synthetic oligonucleotide"
gucaugccaaaaauggacatt

SEQ ID NO: 189 - DNA, 21 bp, Artificial Sequence
  source: /note="Description of Artificial Sequence: Synthetic oligonucleotide"
  source: /note="Description of Combined DNA/RNA Molecule: Synthetic oligonucleotide"
uguccauuuuuggcaugactt

SEQ ID NO: 190 - DNA, 21 bp, Artificial Sequence
  source: /note="Description of Artificial Sequence: Synthetic oligonucleotide"
  source: /note="Description of Combined DNA/RNA Molecule: Synthetic oligonucleotide"
augccaaaaauggacaucatt

SEQ ID NO: 191 - DNA, 21 bp, Artificial Sequence
  source: /note="Description of Artificial Sequence: Synthetic oligonucleotide"
  source: /note="Description of Combined DNA/RNA Molecule: Synthetic oligonucleotide"
ugauguccauuuuuggcautt

SEQ ID NO: 192 - RNA, 19 nt, Homo sapiens
cuccggccagugagaaaga

SEQ ID NO: 193 - RNA, 19 nt, Homo sapiens
ucuuucucacuggccggag

SEQ ID NO: 194 - RNA, 19 nt, Homo sapiens
uggcagcacagaugaauca

SEQ ID NO: 195 - RNA, 19 nt, Homo sapiens
ugauucaucugugcugcca

SEQ ID NO: 196 - RNA, 19 nt, Homo sapiens
cagugugguuagugugaaa

SEQ ID NO: 197 - RNA, 19 nt, Homo sapiens
uuucacacuaaccacacug

SEQ ID NO: 198 - RNA, 19 nt, Homo sapiens
caucaugcaaaagcaaaga

SEQ ID NO: 199 - RNA, 19 nt, Homo sapiens
ucuuugcuuuugcaugaug

SEQ ID NO: 200 - RNA, 19 nt, Homo sapiens
aaagagugucucaucuucu

SEQ ID NO: 201 - RNA, 19 nt, Homo sapiens
agaagaugagacacucuuu

SEQ ID NO: 202 - RNA, 19 nt, Homo sapiens
aagagugucucaucuucuu

SEQ ID NO: 203 - RNA, 19 nt, Homo sapiens
aagaagaugagacacucuu

SEQ ID NO: 204 - RNA, 19 nt, Homo sapiens
ucuguuuccacuuuucagu

SEQ ID NO: 205 - RNA, 19 nt, Homo sapiens
acugaaaaguggaaacaga

SEQ ID NO: 206 - RNA, 19 nt, Homo sapiens
acuuuucaguaugaucguu

SEQ ID NO: 207 - RNA, 19 nt, Homo sapiens
aacgaucauacugaaaagu

SEQ ID NO: 208 - RNA, 19 nt, Homo sapiens
uuucaguaugaucguuucu

SEQ ID NO: 209 - RNA, 19 nt, Homo sapiens
agaaacgaucauacugaaa

SEQ ID NO: 210 - RNA, 19 nt, Homo sapiens
uucaguaugaucguuucuu

SEQ ID NO: 211 - RNA, 19 nt, Homo sapiens
aagaaacgaucauacugaa

SEQ ID NO: 212 - RNA, 19 nt, Homo sapiens
ucaguaugaucguuucuuu

SEQ ID NO: 213 - RNA, 19 nt, Homo sapiens
aaagaaacgaucauacuga

SEQ ID NO: 214 - RNA, 19 nt, Homo sapiens
uaugaucguuucuuugaga

SEQ ID NO: 215 - RNA, 19 nt, Homo sapiens
ucucaaagaaacgaucaua

SEQ ID NO: 216 - RNA, 19 nt, Homo sapiens
ugaccacaccuaucgaguu

SEQ ID NO: 217 - RNA, 19 nt, Homo sapiens
aacucgauaggugugguca

SEQ ID NO: 218 - RNA, 19 nt, Homo sapiens
accacaccuaucgaguuuu

SEQ ID NO: 219 - RNA, 19 nt, Homo sapiens
aaaacucgauagguguggu

SEQ ID NO: 220 - RNA, 19 nt, Homo sapiens
uggcagaugacuauucaga

SEQ ID NO: 221 - RNA, 19 nt, Homo sapiens
ucugaauagucaucugcca

SEQ ID NO: 222 - RNA, 19 nt, Homo sapiens
ucuggugcaguaaugacua

SEQ ID NO: 223 - RNA, 19 nt, Homo sapiens
uagucauuacugcaccaga

SEQ ID NO: 224 - RNA, 19 nt, Homo sapiens
uguggggcaguuauggaca

SEQ ID NO: 225 - RNA, 19 nt, Homo sapiens
uguccauaacugccccaca

SEQ ID NO: 226 - RNA, 19 nt, Homo sapiens
uggacacuuugaaacaaca

SEQ ID NO: 227 - RNA, 19 nt, Homo sapiens
uguuguuucaaagugucca

SEQ ID NO: 228 - RNA, 19 nt, Homo sapiens
auauuucuggaacuaguaa

SEQ ID NO: 229 - RNA, 19 nt, Homo sapiens
uuacuaguuccagaaauau

SEQ ID NO: 230 - RNA, 19 nt, Homo sapiens
auuucuggaacuaguaaau

SEQ ID NO: 231 - RNA, 19 nt, Homo sapiens
auuuacuaguuccagaaau

SEQ ID NO: 232 - RNA, 19 nt, Homo sapiens
uuucuggaacuaguaaauu

SEQ ID NO: 233 - RNA, 19 nt, Homo sapiens
aauuuacuaguuccagaaa

SEQ ID NO: 234 - RNA, 19 nt, Homo sapiens
cuggaacuaguaaauucca

SEQ ID NO: 235 - RNA, 19 nt, Homo sapiens
uggaauuuacuaguuccag

SEQ ID NO: 236 - RNA, 19 nt, Homo sapiens
ugugagauuuacucugauu

SEQ ID NO: 237 - RNA, 19 nt, Homo sapiens
aaucagaguaaaucucaca

SEQ ID NO: 238 - RNA, 19 nt, Homo sapiens
auccaagggauucgaaaca

SEQ ID NO: 239 - RNA, 19 nt, Homo sapiens
uguuucgaaucccuuggau

SEQ ID NO: 240 - RNA, 19 nt, Homo sapiens
agccgagugccaaaguaca

SEQ ID NO: 241 - RNA, 19 nt, Homo sapiens
uguacuuuggcacucggcu

SEQ ID NO: 242 - RNA, 19 nt, Homo sapiens
uuugaaacuguccauucaa

SEQ ID NO: 243 - RNA, 19 nt, Homo sapiens
uugaauggacaguuucaaa

SEQ ID NO: 244 - RNA, 19 nt, Homo sapiens
ugauguggcccaugaguuu

SEQ ID NO: 245 - RNA, 19 nt, Homo sapiens
aaacucaugggccacauca

SEQ ID NO: 246 - RNA, 19 nt, Homo sapiens
gucaugccaaaaauggaca

SEQ ID NO: 247 - RNA, 19 nt, Homo sapiens
uguccauuuuuggcaugac

SEQ ID NO: 248 - RNA, 19 nt, Homo sapiens
ccaaaaauggacaucauuu

SEQ ID NO: 249 - RNA, 19 nt, Homo sapiens
aaaugauguccauuuuugg

SEQ ID NO: 250 - RNA, 19 nt, Homo sapiens
acgaguucucugauugaca

SEQ ID NO: 251 - RNA, 19 nt, Homo sapiens
ugucaaucagagaacucgu

SEQ ID NO: 252 - RNA, 19 nt, Homo sapiens
aagucugugaugaacuaau

SEQ ID NO: 253 - RNA, 19 nt, Homo sapiens
auuaguucaucacagacuu

SEQ ID NO: 254 - RNA, 19 nt, Homo sapiens
ugugaugaacuaaugagca

SEQ ID NO: 255 - RNA, 19 nt, Homo sapiens
ugcucauuaguucaucaca

SEQ ID NO: 256 - RNA, 19 nt, Homo sapiens
uaaugagcagacauaacau

SEQ ID NO: 257 - RNA, 19 nt, Homo sapiens
auguuaugucugcucauua

SEQ ID NO: 258 - RNA, 19 nt, Homo sapiens
uuugaagugaugagugaaa

SEQ ID NO: 259 - RNA, 19 nt, Homo sapiens
uuucacucaucacuucaaa

SEQ ID NO: 260 - RNA, 19 nt, Homo sapiens
aggcuugagcaaguuggua

SEQ ID NO: 261 - RNA, 19 nt, Homo sapiens
uaccaacuugcucaagccu

SEQ ID NO: 262 - RNA, 19 nt, Homo sapiens
ucuucagaguugucuuuau

SEQ ID NO: 263 - RNA, 19 nt, Homo sapiens
auaaagacaacucugaaga

SEQ ID NO: 264 - RNA, 19 nt, Homo sapiens
cagaguugucuuuauaugu

SEQ ID NO: 265 - RNA, 19 nt, Homo sapiens
acauauaaagacaacucug

SEQ ID NO: 266 - RNA, 19 nt, Homo sapiens
gaguugucuuuauauguga

SEQ ID NO: 267 - RNA, 19 nt, Homo sapiens
ucacauauaaagacaacuc

SEQ ID NO: 268 - RNA, 19 nt, Homo sapiens
aguugucuuuauaugugaa

SEQ ID NO: 269 - RNA, 19 nt, Homo sapiens
uucacauauaaagacaacu

SEQ ID NO: 270 - RNA, 19 nt, Homo sapiens
uuauauuaaauuuuaaucu

SEQ ID NO: 271 - RNA, 19 nt, Homo sapiens
agauuaaaauuuaauauaa

SEQ ID NO: 272 - RNA, 19 nt, Homo sapiens
aauuuuaaucuauaguaaa

SEQ ID NO: 273 - RNA, 19 nt, Homo sapiens
uuuacuauagauuaaaauu

SEQ ID NO: 274 - RNA, 19 nt, Homo sapiens
auuuuaaucuauaguaaaa

SEQ ID NO: 275 - RNA, 19 nt, Homo sapiens
uuuuacuauagauuaaaau

SEQ ID NO: 276 - RNA, 19 nt, Homo sapiens
aguccuggaaauaaauucu

SEQ ID NO: 277 - RNA, 19 nt, Homo sapiens
agaauuuauuuccaggacu

SEQ ID NO: 278 - RNA, 19 nt, Homo sapiens
cugcccauucuuaucccga

SEQ ID NO: 279 - RNA, 19 nt, Homo sapiens
ucgggauaagaaugggcag

SEQ ID NO: 280 - RNA, 19 nt, Homo sapiens
ccagugugguuagugugaa

SEQ ID NO: 281 - RNA, 19 nt, Homo sapiens
uucacacuaaccacacugg

SEQ ID NO: 282 - RNA, 19 nt, Homo sapiens
gucuggugcaguaaugacu

SEQ ID NO: 283 - RNA, 19 nt, Homo sapiens
agucauuacugcaccagac

SEQ ID NO: 284 - RNA, 19 nt, Homo sapiens
gcacucuuguuuuccucgu

SEQ ID NO: 285 - RNA, 19 nt, Homo sapiens
acgaggaaaacaagagugc

SEQ ID NO: 286 - RNA, 19 nt, Homo sapiens
gaguuuggagcaaucaccu

SEQ ID NO: 287 - RNA, 19 nt, Homo sapiens
aggugauugcuccaaacuc

SEQ ID NO: 288 - RNA, 19 nt, Homo sapiens
ggcuugagcaaguugguau

SEQ ID NO: 289 - RNA, 19 nt, Homo sapiens
auaccaacuugcucaagcc

SEQ ID NO: 290 - RNA, 19 nt, Homo sapiens
ggcaaaucucuguuguucu

SEQ ID NO: 291 - RNA, 19 nt, Homo sapiens
agaacaacagagauuugcc

SEQ ID NO: 292 - RNA, 19 nt, Homo sapiens
ggcaaaucucuguuguucu

SEQ ID NO: 293 - RNA, 19 nt, Homo sapiens
agaacaacagagauuugcc

SEQ ID NO: 294 - RNA, 19 nt, Homo sapiens
caaagaccagaaagagugu

SEQ ID NO: 295 - RNA, 19 nt, Homo sapiens
acacucuuucuggucuuug

SEQ ID NO: 296 - RNA, 19 nt, Homo sapiens
ggugcaguaaugacuaccu

SEQ ID NO: 297 - RNA, 19 nt, Homo sapiens
agguagucauuacugcacc

SEQ ID NO: 298 - RNA, 19 nt, Homo sapiens
cuuguuuuccucgugcuuu

SEQ ID NO: 299 - RNA, 19 nt, Homo sapiens
aaagcacgaggaaaacaag

SEQ ID NO: 300 - RNA, 19 nt, Homo sapiens
ggggaucgggauggaguca

SEQ ID NO: 301 - RNA, 19 nt, Homo sapiens
ugacuccaucccgaucccc

SEQ ID NO: 302 - RNA, 19 nt, Homo sapiens
cuugagcaaguugguaucu

SEQ ID NO: 303 - RNA, 19 nt, Homo sapiens
agauaccaacuugcucaag

SEQ ID NO: 304 - RNA, 19 nt, Homo sapiens
ccccaagaugauggaaguu

SEQ ID NO: 305 - RNA, 19 nt, Homo sapiens
aacuuccaucaucuugggg

SEQ ID NO: 306 - RNA, 19 nt, Homo sapiens
ccccaagaugauggaaguu

SEQ ID NO: 307 - RNA, 19 nt, Homo sapiens
aacuuccaucaucuugggg

SEQ ID NO: 308 - RNA, 19 nt, Homo sapiens
cucaucuucuucaagauaa

SEQ ID NO: 309 - RNA, 19 nt, Homo sapiens
uuaucuugaagaagaugag

SEQ ID NO: 310 - RNA, 19 nt, Homo sapiens
ggggcaguuauggacacuu

SEQ ID NO: 311 - RNA, 19 nt, Homo sapiens
aaguguccauaacugcccc

SEQ ID NO: 312 - RNA, 19 nt, Homo sapiens
gaugccaggcugugagauu

SEQ ID NO: 313 - RNA, 19 nt, Homo sapiens
aaucucacagccuggcauc

SEQ ID NO: 314 - RNA, 19 nt, Homo sapiens
gagacagaugcuaauggau

SEQ ID NO: 315 - RNA, 19 nt, Homo sapiens
auccauuagcaucugucuc

SEQ ID NO: 316 - RNA, 19 nt, Homo sapiens
ccccaggccauuaucauau

SEQ ID NO: 317 - RNA, 19 nt, Homo sapiens
auaugauaauggccugggg

SEQ ID NO: 318 - RNA, 19 nt, Homo sapiens
cagcaguacacuaccaaca

SEQ ID NO: 319 - RNA, 19 nt, Homo sapiens
uguugguaguguacugcug

SEQ ID NO: 320 - RNA, 19 nt, Homo sapiens
cagcaguacacuaccaaca

SEQ ID NO: 321 - RNA, 19 nt, Homo sapiens
uguugguaguguacugcug

SEQ ID NO: 322 - RNA, 19 nt, Homo sapiens
cuguuuccacuuuucagua

SEQ ID NO: 323 - RNA, 19 nt, Homo sapiens
uacugaaaaguggaaacag

SEQ ID NO: 324 - RNA, 19 nt, Homo sapiens
ggacacuuugaaacaacau

SEQ ID NO: 325 - RNA, 19 nt, Homo sapiens
auguuguuucaaagugucc

SEQ ID NO: 326 - RNA, 19 nt, Homo sapiens
cugugagauuuacucugau

SEQ ID NO: 327 - RNA, 19 nt, Homo sapiens
aucagaguaaaucucacag

SEQ ID NO: 328 - RNA, 19 nt, Homo sapiens
cccugugcggguugcagau

SEQ ID NO: 329 - RNA, 19 nt, Homo sapiens
aucugcaacccgcacaggg

SEQ ID NO: 330 - RNA, 19 nt, Homo sapiens
gucuucagaguugucuuua

SEQ ID NO: 331 - RNA, 19 nt, Homo sapiens
uaaagacaacucugaagac

SEQ ID NO: 332 - RNA, 19 nt, Homo sapiens
cacugcaagcaaaugcccu

SEQ ID NO: 333 - RNA, 19 nt, Homo sapiens
agggcauuugcuugcagug

SEQ ID NO: 334 - RNA, 19 nt, Homo sapiens
cacuuuucaguaugaucgu

SEQ ID NO: 335 - RNA, 19 nt, Homo sapiens
acgaucauacugaaaagug

SEQ ID NO: 336 - RNA, 19 nt, Homo sapiens
ggggcaggugguacuagaa

SEQ ID NO: 337 - RNA, 19 nt, Homo sapiens
uucuaguaccaccugcccc

SEQ ID NO: 338 - RNA, 19 nt, Homo sapiens
ggaaccaugccuccaugau

SEQ ID NO: 339 - RNA, 19 nt, Homo sapiens
aucauggaggcaugguucc

SEQ ID NO: 340 - RNA, 19 nt, Homo sapiens
gucugugaugaacuaauga

SEQ ID NO: 341 - RNA, 19 nt, Homo sapiens
ucauuaguucaucacagac

SEQ ID NO: 342 - RNA, 19 nt, Homo sapiens
guugucuuuauaugugaau

SEQ ID NO: 343 - RNA, 19 nt, Homo sapiens
auucacauauaaagacaac

SEQ ID NO: 344 - RNA, 19 nt, Homo sapiens
gcagcacagaugaaucaga

SEQ ID NO: 345 - RNA, 19 nt, Homo sapiens
ucugauucaucugugcugc

SEQ ID NO: 346 - RNA, 19 nt, Homo sapiens
cuuuucaguaugaucguuu

SEQ ID NO: 347 - RNA, 19 nt, Homo sapiens
aaacgaucauacugaaaag

SEQ ID NO: 348 - RNA, 19 nt, Homo sapiens
gggcaggugguacuagaaa

SEQ ID NO: 349 - RNA, 19 nt, Homo sapiens
uuucuaguaccaccugccc

SEQ ID NO: 350 - RNA, 19 nt, Homo sapiens
guccccaagauuguggcau

SEQ ID NO: 351 - RNA, 19 nt, Homo sapiens
augccacaaucuuggggac

SEQ ID NO: 352 - RNA, 19 nt, Homo sapiens
cuaaugagcagacauaaca

SEQ ID NO: 353 - RNA, 19 nt, Homo sapiens
uguuaugucugcucauuag

SEQ ID NO: 354 - RNA, 19 nt, Homo sapiens
gccccagugugguuagugu

SEQ ID NO: 355 - RNA, 19 nt, Homo sapiens
acacuaaccacacuggggc

SEQ ID NO: 356 - RNA, 19 nt, Homo sapiens
gaucguuucuuugagaaaa

SEQ ID NO: 357 - RNA, 19 nt, Homo sapiens
uuuucucaaagaaacgauc

SEQ ID NO: 358 - RNA, 19 nt, Homo sapiens
ggcaggugguacuagaaau

SEQ ID NO: 359 - RNA, 19 nt, Homo sapiens
auuucuaguaccaccugcc

SEQ ID NO: 360 - RNA, 19 nt, Homo sapiens
gugauguggcccaugaguu

SEQ ID NO: 361 - RNA, 19 nt, Homo sapiens
aacucaugggccacaucac

SEQ ID NO: 362 - RNA, 19 nt, Homo sapiens
caagcaaucaauuacccua

SEQ ID NO: 363 - RNA, 19 nt, Homo sapiens
uaggguaauugauugcuug

SEQ ID NO: 364 - RNA, 19 nt, Homo sapiens
cccagugugguuaguguga

SEQ ID NO: 365 - RNA, 19 nt, Homo sapiens
ucacacuaaccacacuggg

SEQ ID NO: 366 - RNA, 19 nt, Homo sapiens
gaccacaccuaucgaguuu

SEQ ID NO: 367 - RNA, 19 nt, Homo sapiens
aaacucgauaggugugguc

SEQ ID NO: 368 - RNA, 19 nt, Homo sapiens
gaacuaguaaauuccaugu

SEQ ID NO: 369 - RNA, 19 nt, Homo sapiens
acauggaauuuacuaguuc

SEQ ID NO: 370 - RNA, 19 nt, Homo sapiens
caugaguuuggagcaauca

SEQ ID NO: 371 - RNA, 19 nt, Homo sapiens
ugauugcuccaaacucaug

SEQ ID NO: 372 - RNA, 19 nt, Homo sapiens
ccccagaugaugaacuacu

SEQ ID NO: 373 - RNA, 19 nt, Homo sapiens
aguaguucaucaucugggg

SEQ ID NO: 374 - RNA, 19 nt, Homo sapiens
gcccauucuuaucccgagu

SEQ ID NO: 375 - RNA, 19 nt, Homo sapiens
acucgggauaagaaugggc

SEQ ID NO: 376 - RNA, 19 nt, Homo sapiens
ccuccaugauccaagggau

SEQ ID NO: 377 - RNA, 19 nt, Homo sapiens
aucccuuggaucauggagg

SEQ ID NO: 378 - RNA, 19 nt, Homo sapiens
gucaugccaaaaauggaca

SEQ ID NO: 379 - RNA, 19 nt, Homo sapiens
uguccauuuuuggcaugac

SEQ ID NO: 380 - RNA, 19 nt, Homo sapiens
augccaaaaauggacauca

SEQ ID NO: 381 - RNA, 19 nt, Homo sapiens
ugauguccauuuuuggcau

SEQ ID NO: 382 - DNA, 2458 bp, Homo sapiens
cagaagaaggcagcgcccaaggcgcatgcgcagcggtcactcccgctgtatattaaggcgccggcgatcgcggcctgaggctgctcccggacaagggcaacgagcgtttcgtttggacttctcgacttgagtgcccgcctccttcgccgccgcctctgcagtcctcagcgcagttatgcccagttcttcccgctgtggggacacgaccacggaggaatccttgcttcagggactcgggaccctgctggaccccttcctcgggtttaggggatgtggggaccaggagaaagtcaggatccctaagagtcttccctgcctggatggatgagtggcttcttctccacctagattctttccacaggagccagcatacttcctgaacatggagagtgttgttcgccgctgcccattcttatcccgagtcccccaggcctttctgcagaaagcaggcaaatctctgttgttctatgcccaaaactgccccaagatgatggaagttggggccaagccagcccctcgggcattgtccactgcagcagtacactaccaacagatcaaagaaacccctccggccagtgagaaagacaaaactgctaaggccaaggtccaacagactcctgatggatcccagcagagtccagatggcacacagcttccgtctggacaccccttgcctgccacaagccagggcactgcaagcaaatgccctttcctggcagcacagatgaatcagagaggcagcagtgtcttctgcaaagccagtcttgagcttcaggaggatgtgcaggaaatgaatgccgtgaggaaagaggttgctgaaacctcagcaggccccagtgtggttagtgtgaaaaccgatggaggggatcccagtggactgctgaagaacttccaggacatcatgcaaaagcaaagaccagaaagagtgtctcatcttcttcaagataacttgccaaaatctgtttccacttttcagtatgatcgtttctttgagaaaaaaattgatgagaaaaagaatgaccacacctatcgagtttttaaaactgtgaaccggcgagcacacatcttccccatggcagatgactattcagactccctcatcaccaaaaagcaagtgtcagtctggtgcagtaatgactacctaggaatgagtcgccacccacgggtgtgtggggcagttatggacactttgaaacaacatggtgctggggcaggtggtactagaaatatttctggaactagtaaattccatgtggacttagagcgggagctggcagacctccatgggaaagatgccgcactcttgttttcctcgtgctttgtggccaatgactcaaccctcttcaccctggctaagatgatgccaggctgtgagatttactctgattctgggaaccatgcctccatgatccaagggattcgaaacagccgagtgccaaagtacatcttccgccacaatgatgtcagccacctcagagaactgctgcaaagatctgacccctcagtccccaagattgtggcatttgaaactgtccattcaatggatggggcggtgtgcccactggaagagctgtgtgatgtggcccatgagtttggagcaatcaccttcgtggatgaggtccacgcagtggggctttatggggctcgaggcggagggattggggatcgggatggagtcatgccaaaaatggacatcatttctggaacacttggcaaagcctttggttgtgttggagggtacatcgccagcacgagttctctgattgacaccgtacggtcctatgctgctggcttcatcttcaccacctctctgccacccatgctgctggctggagccctggagtctgtgcggatcctgaagagcgctgagggacgggtgcttcgccgccagcaccagcgcaacgtcaaactcatgagacagatgctaatggatgccggcctccctgttgtccactgccccagccacatcatccctgtgcgggttgcagatgctgctaaaaacacagaagtctgtgatgaactaatgagcagacataacatctacgtgcaagcaatcaattaccctacggtgccccggggagaagagctcctacggattgcccccacccctcaccacacaccccagatgatgaactacttccttgagaatctgctagtcacatggaagcaagtggggctggaactgaagcctcattcctcagctgagtgcaacttctgcaggaggccactgcattttgaagtgatgagtgaaagagagaagtcctatttctcaggcttgagcaagttggtatctgctcaggcctgagcatgacctcaattatttcacttaaccccaggccattatcatatccagatggtcttcagagttgtctttatatgtgaattaagttatattaaattttaatctatagtaaaaacatagtcctggaaataaattcttgcttaaatggtgaaaaaa

SEQ ID NO: 383 - DNA, 21 bp, Artificial Sequence
  source: /note="Description of Artificial Sequence: Synthetic oligonucleotide"
  source: /note="Description of Combined DNA/RNA Molecule: Synthetic oligonucleotide"
cugugaaauuuacucugautt

SEQ ID NO: 384 - DNA, 21 bp, Artificial Sequence
  source: /note="Description of Artificial Sequence: Synthetic oligonucleotide"
  source: /note="Description of Combined DNA/RNA Molecule: Synthetic oligonucleotide"
aucagaguaaauuucacagtt

SEQ ID NO: 385 - RNA, 21 nt, Artificial Sequence
  source: /note="Description of Artificial Sequence: Synthetic oligonucleotide"
aagucuguuuccacuuuucaa

SEQ ID NO: 386 - RNA, 23 nt, Artificial Sequence
  source: /note="Description of Artificial Sequence: Synthetic oligonucleotide"
uugaaaaguggaaacagacuuug

SEQ ID NO: 387 - RNA, 21 nt, Artificial Sequence
  source: /note="Description of Artificial Sequence: Synthetic oligonucleotide"
acauaguagccagaauugucu

SEQ ID NO: 388 - RNA, 23 nt, Artificial Sequence
  source: /note="Description of Artificial Sequence: Synthetic oligonucleotide"
agacaauucuggcuacuaugugg

SEQ ID NO: 389 - RNA, 21 nt, Artificial Sequence
  source: /note="Description of Artificial Sequence: Synthetic oligonucleotide"
aagucuguuuccacuuuucaa

SEQ ID NO: 390 - RNA, 23 nt, Artificial Sequence
  source: /note="Description of Artificial Sequence: Synthetic oligonucleotide"
uugaaaaguggaaacagacuuug

SEQ ID NO: 391 - RNA, 21 nt, Homo sapiens
caugccaaaaauggacaucau

SEQ ID NO: 392 - RNA, 23 nt, Homo sapiens
augauguccauuuuuggcaugac

SEQ ID NO: 393 - RNA, 21 nt, Homo sapiens
uaaauuuuaaucuauaguaaa

SEQ ID NO: 394 - RNA, 23 nt, Homo sapiens
uuuacuauagauuaaaauuuaau

SEQ ID NO: 395 - RNA, 21 nt, Homo sapiens
ggcugugagauuuacucugau

SEQ ID NO: 396 - RNA, 23 nt, Homo sapiens
aucagaguaaaucucacagccug

SEQ ID NO: 397 - RNA, 21 nt, Homo sapiens
ugccaaaaauggacaucauuu

SEQ ID NO: 398 - RNA, 23 nt, Homo sapiens
aaaugauguccauuuuuggcaug

SEQ ID NO: 399 - RNA, 21 nt, Homo sapiens
augauccaagggauucgaaac

SEQ ID NO: 400 - RNA, 23 nt, Homo sapiens
guuucgaaucccuuggaucaugg

SEQ ID NO: 401 - RNA, 21 nt, Homo sapiens
acuuuucaguaugaucguuuc

SEQ ID NO: 402 - RNA, 23 nt, Homo sapiens
gaaacgaucauacugaaaagugg

SEQ ID NO: 403 - RNA, 21 nt, Homo sapiens
cccagugugguuagugugaaa

SEQ ID NO: 404 - RNA, 23 nt, Homo sapiens
uuucacacuaaccacacuggggc

SEQ ID NO: 405 - RNA, 21 nt, Homo sapiens
ugugauguggcccaugaguuu

SEQ ID NO: 406 - RNA, 23 nt, Homo sapiens
aaacucaugggccacaucacaca

SEQ ID NO: 407 - RNA, 21 nt, Homo sapiens
auuuugaagugaugagugaaa

SEQ ID NO: 408 - RNA, 23 nt, Homo sapiens
uuucacucaucacuucaaaaugc

SEQ ID NO: 409 - RNA, 21 nt, Homo sapiens
uucaguaugaucguuucuuug

SEQ ID NO: 410 - RNA, 23 nt, Homo sapiens
caaagaaacgaucauacugaaaa

SEQ ID NO: 411 - RNA, 21 nt, Homo sapiens
gaccagaaagagugucucauc

SEQ ID NO: 412 - RNA, 23 nt, Homo sapiens
gaugagacacucuuucuggucuu

SEQ ID NO: 413 - RNA, 21 nt, Homo sapiens
uucugcaaagccagucuugag

SEQ ID NO: 414 - RNA, 23 nt, Homo sapiens
cucaagacuggcuuugcagaaga

SEQ ID NO: 415 - RNA, 21 nt, Homo sapiens
caugauccaagggauucgaaa

SEQ ID NO: 416 - RNA, 23 nt, Homo sapiens
uuucgaaucccuuggaucaugga

SEQ ID NO: 417 - RNA, 21 nt, Homo sapiens
ucaugccaaaaauggacauca

SEQ ID NO: 418 - RNA, 23 nt, Homo sapiens
ugauguccauuuuuggcaugacu

SEQ ID NO: 419 - RNA, 21 nt, Homo sapiens
gcugugagauuuacucugauu

SEQ ID NO: 420 - RNA, 23 nt, Homo sapiens
aaucagaguaaaucucacagccu

SEQ ID NO: 421 - RNA, 21 nt, Homo sapiens
aagagagaaguccuauuucuc

SEQ ID NO: 422 - RNA, 23 nt, Homo sapiens
gagaaauaggacuucucucuuuc

SEQ ID NO: 423 - RNA, 21 nt, Homo sapiens
aguuauauuaaauuuuaaucu

SEQ ID NO: 424 - RNA, 23 nt, Homo sapiens
agauuaaaauuuaauauaacuua

SEQ ID NO: 425 - RNA, 21 nt, Homo sapiens
cacuuuucaguaugaucguuu

SEQ ID NO: 426 - RNA, 23 nt, Homo sapiens
aaacgaucauacugaaaagugga

SEQ ID NO: 427 - RNA, 21 nt, Homo sapiens
accagaaagagugucucaucu

SEQ ID NO: 428 - RNA, 23 nt, Homo sapiens
agaugagacacucuuucuggucu

SEQ ID NO: 429 - RNA, 21 nt, Homo sapiens
gaggaaagagguugcugaaac

SEQ ID NO: 430 - RNA, 23 nt, Homo sapiens
guuucagcaaccucuuuccucac

SEQ ID NO: 431 - RNA, 21 nt, Homo sapiens
agaccagaaagagugucucau

SEQ ID NO: 432 - RNA, 23 nt, Homo sapiens
augagacacucuuucuggucuuu

SEQ ID NO: 433 - RNA, 21 nt, Homo sapiens
aauauuucuggaacuaguaaa

SEQ ID NO: 434 - RNA, 23 nt, Homo sapiens
uuuacuaguuccagaaauauuuc

SEQ ID NO: 435 - RNA, 21 nt, Homo sapiens
aggcuugagcaaguugguauc

SEQ ID NO: 436 - RNA, 23 nt, Homo sapiens
gauaccaacuugcucaagccuga

SEQ ID NO: 437 - RNA, 21 nt, Homo sapiens
uggcagcacagaugaaucaga

SEQ ID NO: 438 - RNA, 23 nt, Homo sapiens
ucugauucaucugugcugccagg

SEQ ID NO: 439 - RNA, 21 nt, Homo sapiens
gcauuuugaagugaugaguga

SEQ ID NO: 440 - RNA, 23 nt, Homo sapiens
ucacucaucacuucaaaaugcag

SEQ ID NO: 441 - RNA, 21 nt, Homo sapiens
aaaucuguuuccacuuuucag

SEQ ID NO: 442 - RNA, 23 nt, Homo sapiens
cugaaaaguggaaacagauuuug

SEQ ID NO: 443 - RNA, 21 nt, Homo sapiens
acuaaugagcagacauaacau

SEQ ID NO: 444 - RNA, 23 nt, Homo sapiens
auguuaugucugcucauuaguuc

SEQ ID NO: 445 - RNA, 21 nt, Homo sapiens
gguacuagaaauauuucugga

SEQ ID NO: 446 - RNA, 23 nt, Homo sapiens
uccagaaauauuucuaguaccac

SEQ ID NO: 447 - RNA, 21 nt, Homo sapiens
auccugaagagcgcugaggga

SEQ ID NO: 448 - RNA, 23 nt, Homo sapiens
ucccucagcgcucuucaggaucc

SEQ ID NO: 449 - RNA, 21 nt, Homo sapiens
cuucuucaagauaacuugcca

SEQ ID NO: 450 - RNA, 23 nt, Homo sapiens
uggcaaguuaucuugaagaagau

SEQ ID NO: 451 - RNA, 21 nt, Homo sapiens
gaaagagugucucaucuucuu

SEQ ID NO: 452 - RNA, 23 nt, Homo sapiens
aagaagaugagacacucuuucug

SEQ ID NO: 453 - RNA, 21 nt, Homo sapiens
augaucguuucuuugagaaaa

SEQ ID NO: 454 - RNA, 23 nt, Homo sapiens
uuuucucaaagaaacgaucauac

SEQ ID NO: 455 - RNA, 21 nt, Homo sapiens
gaacuaaugagcagacauaac

SEQ ID NO: 456 - RNA, 23 nt, Homo sapiens
guuaugucugcucauuaguucau

SEQ ID NO: 457 - RNA, 21 nt, Homo sapiens
cauuugaaacuguccauucaa

SEQ ID NO: 458 - RNA, 23 nt, Homo sapiens
uugaauggacaguuucaaaugcc

SEQ ID NO: 459 - RNA, 21 nt, Homo sapiens
uaguaaaaacauaguccugga

SEQ ID NO: 460 - RNA, 23 nt, Homo sapiens
uccaggacuauguuuuuacuaua

SEQ ID NO: 461 - RNA, 21 nt, Homo sapiens
gacaucaugcaaaagcaaaga

SEQ ID NO: 462 - RNA, 23 nt, Homo sapiens
ucuuugcuuuugcaugauguccu

SEQ ID NO: 463 - RNA, 21 nt, Homo sapiens
gucugugaugaacuaaugagc

SEQ ID NO: 464 - RNA, 23 nt, Homo sapiens
gcucauuaguucaucacagacuu

SEQ ID NO: 465 - RNA, 21 nt, Homo sapiens
uuucaguaugaucguuucuuu

SEQ ID NO: 466 - RNA, 23 nt, Homo sapiens
aaagaaacgaucauacugaaaag

SEQ ID NO: 467 - RNA, 21 nt, Homo sapiens
auuucuggaacuaguaaauuc

SEQ ID NO: 468 - RNA, 23 nt, Homo sapiens
gaauuuacuaguuccagaaauau

SEQ ID NO: 469 - RNA, 21 nt, Homo sapiens
ucuggaacuaguaaauuccau

SEQ ID NO: 470 - RNA, 23 nt, Homo sapiens
auggaauuuacuaguuccagaaa

SEQ ID NO: 471 - RNA, 21 nt, Homo sapiens
aaugaccacaccuaucgaguu

SEQ ID NO: 472 - RNA, 23 nt, Homo sapiens
aacucgauagguguggucauucu

SEQ ID NO: 473 - RNA, 21 nt, Homo sapiens
ccuaucgaguuuuuaaaacug

SEQ ID NO: 474 - RNA, 23 nt, Homo sapiens
caguuuuaaaaacucgauaggug

SEQ ID NO: 475 - RNA, 21 nt, Homo sapiens
uauuucuggaacuaguaaauu

SEQ ID NO: 476 - RNA, 23 nt, Homo sapiens
aauuuacuaguuccagaaauauu

SEQ ID NO: 477 - RNA, 21 nt, Homo sapiens
aaauuuuaaucuauaguaaaa

SEQ ID NO: 478 - RNA, 23 nt, Homo sapiens
uuuuacuauagauuaaaauuuaa

SEQ ID NO: 479 - RNA, 21 nt, Homo sapiens
cagaaagagugucucaucuuc

SEQ ID NO: 480 - RNA, 23 nt, Homo sapiens
gaagaugagacacucuuucuggu

SEQ ID NO: 481 - RNA, 19 nt, Homo sapiens
gcccauucuuaucccgagu

SEQ ID NO: 482 - RNA, 19 nt, Homo sapiens
acucgggauaagaaugggc

SEQ ID NO: 483 - RNA, 19 nt, Homo sapiens
caaaacugccccaagauga

SEQ ID NO: 484 - RNA, 19 nt, Homo sapiens
ucaucuuggggcaguuuug

SEQ ID NO: 485 - RNA, 19 nt, Homo sapiens
cagaaagagugucucaucu

SEQ ID NO: 486 - RNA, 19 nt, Homo sapiens
agaugagacacucuuucug

SEQ ID NO: 487 - RNA, 19 nt, Homo sapiens
agaaagagugucucaucuu

SEQ ID NO: 488 - RNA, 19 nt, Homo sapiens
aagaugagacacucuuucu

SEQ ID NO: 489 - RNA, 19 nt, Homo sapiens
aagagugucucaucuucuu

SEQ ID NO: 490 - RNA, 19 nt, Homo sapiens
aagaagaugagacacucuu

SEQ ID NO: 491 - RNA, 19 nt, Homo sapiens
cucuucacccuggcuaaga

SEQ ID NO: 492 - RNA, 19 nt, Homo sapiens
ucuuagccagggugaagag

SEQ ID NO: 493 - RNA, 19 nt, Homo sapiens
ucuucacccuggcuaagau

SEQ ID NO: 494 - RNA, 19 nt, Homo sapiens
aucuuagccagggugaaga

SEQ ID NO: 495 - RNA, 19 nt, Homo sapiens
ucacccuggcuaagaugau

SEQ ID NO: 496 - RNA, 19 nt, Homo sapiens
aucaucuuagccaggguga

SEQ ID NO: 497 - RNA, 19 nt, Homo sapiens
ggaaccaugccuccaugau

SEQ ID NO: 498 - RNA, 19 nt, Homo sapiens
aucauggaggcaugguucc

SEQ ID NO: 499 - RNA, 19 nt, Homo sapiens
gccuccaugauccaaggga

SEQ ID NO: 500 - RNA, 19 nt, Homo sapiens
ucccuuggaucauggaggc

SEQ ID NO: 501 - RNA, 19 nt, Homo sapiens
ccuccaugauccaagggau

SEQ ID NO: 502 - RNA, 19 nt, Homo sapiens
aucccuuggaucauggagg

SEQ ID NO: 503 - RNA, 19 nt, Homo sapiens
cuccaugauccaagggauu

SEQ ID NO: 504 - RNA, 19 nt, Homo sapiens
aaucccuuggaucauggag

SEQ ID NO: 505 - RNA, 19 nt, Homo sapiens
gucaugccaaaaauggaca

SEQ ID NO: 506 - RNA, 19 nt, Homo sapiens
uguccauuuuuggcaugac

SEQ ID NO: 507 - RNA, 19 nt, Homo sapiens
augccaaaaauggacauca

SEQ ID NO: 508 - RNA, 19 nt, Homo sapiens
ugauguccauuuuuggcau

SEQ ID NO: 509 - RNA, 19 nt, Homo sapiens
ugccaaaaauggacaucau

SEQ ID NO: 510 - RNA, 19 nt, Homo sapiens
augauguccauuuuuggca

SEQ ID NO: 511 - RNA, 19 nt, Homo sapiens
cccuggagucugugcggau

SEQ ID NO: 512 - RNA, 19 nt, Homo sapiens
auccgcacagacuccaggg

SEQ ID NO: 513 - RNA, 19 nt, Homo sapiens
uggagucugugcggauccu

SEQ ID NO: 514 - RNA, 19 nt, Homo sapiens
aggauccgcacagacucca

SEQ ID NO: 515 - RNA, 19 nt, Homo sapiens
caucaucccugugcggguu

SEQ ID NO: 516 - RNA, 19 nt, Homo sapiens
aacccgcacagggaugaug

SEQ ID NO: 517 - RNA, 19 nt, Homo sapiens
ugcccauucuuaucccgaa

SEQ ID NO: 518 - RNA, 19 nt, Homo sapiens
uucgggauaagaaugggca

SEQ ID NO: 519 - RNA, 19 nt, Homo sapiens
ccauucuuaucccgaguca

SEQ ID NO: 520 - RNA, 19 nt, Homo sapiens
ugacucgggauaagaaugg

SEQ ID NO: 521 - RNA, 19 nt, Homo sapiens
cauucuuaucccgagucca

SEQ ID NO: 522 - RNA, 19 nt, Homo sapiens
uggacucgggauaagaaug

SEQ ID NO: 523 - RNA, 19 nt, Homo sapiens
ugccccaagaugauggaau

SEQ ID NO: 524 - RNA, 19 nt, Homo sapiens
auuccaucaucuuggggca

SEQ ID NO: 525 - RNA, 19 nt, Homo sapiens
ccagaaagagugucucaua

SEQ ID NO: 526 - RNA, 19 nt, Homo sapiens
uaugagacacucuuucugg

SEQ ID NO: 527 - RNA, 19 nt, Homo sapiens
gaaagagugucucaucuua

SEQ ID NO: 528 - RNA, 19 nt, Homo sapiens
uaagaugagacacucuuuc

SEQ ID NO: 529 - RNA, 19 nt, Homo sapiens
cacccacggguguguggga

SEQ ID NO: 530 - RNA, 19 nt, Homo sapiens
ucccacacacccgugggug

SEQ ID NO: 531 - RNA, 19 nt, Homo sapiens
acccacgggugugugggga

SEQ ID NO: 532 - RNA, 19 nt, Homo sapiens
uccccacacacccgugggu

SEQ ID NO: 533 - RNA, 19 nt, Homo sapiens
cuucacccuggcuaagaua

SEQ ID NO: 534 - RNA, 19 nt, Homo sapiens
uaucuuagccagggugaag

SEQ ID NO: 535 - RNA, 19 nt, Homo sapiens
cacccuggcuaagaugaua

SEQ ID NO: 536 - RNA, 19 nt, Homo sapiens
uaucaucuuagccagggug

SEQ ID NO: 537 - RNA, 19 nt, Homo sapiens
acccuggcuaagaugauga

SEQ ID NO: 538 - RNA, 19 nt, Homo sapiens
ucaucaucuuagccagggu

SEQ ID NO: 539 - RNA, 19 nt, Homo sapiens
gaaccaugccuccaugaua

SEQ ID NO: 540 - RNA, 19 nt, Homo sapiens
uaucauggaggcaugguuc

SEQ ID NO: 541 - RNA, 19 nt, Homo sapiens
gaaacuguccauucaauga

SEQ ID NO: 542 - RNA, 19 nt, Homo sapiens
ucauugaauggacaguuuc

SEQ ID NO: 543 - RNA, 19 nt, Homo sapiens
uggagcccuggagucugua

SEQ ID NO: 544 - RNA, 19 nt, Homo sapiens
uacagacuccagggcucca

SEQ ID NO: 545 - RNA, 19 nt, Homo sapiens
ggagucugugcggauccua

SEQ ID NO: 546 - RNA, 19 nt, Homo sapiens
uaggauccgcacagacucc

SEQ ID NO: 547 - RNA, 19 nt, Homo sapiens
cacaucaucccugugcgga

SEQ ID NO: 548 - RNA, 19 nt, Homo sapiens
uccgcacagggaugaugug

SEQ ID NO: 549 - RNA, 19 nt, Homo sapiens
aucaucccugugcggguua

SEQ ID NO: 550 - RNA, 19 nt, Homo sapiens
uaacccgcacagggaugau

SEQ ID NO: 551 - RNA, 19 nt, Homo sapiens
ucaucccugugcggguuga

SEQ ID NO: 552 - RNA, 19 nt, Homo sapiens
ucaacccgcacagggauga

SEQ ID NO: 553 - RNA, 19 nt, Homo sapiens
uauauuaaggcgccggcga

SEQ ID NO: 554 - RNA, 19 nt, Homo sapiens
ucgccggcgccuuaauaua

SEQ ID NO: 555 - RNA, 19 nt, Homo sapiens
auauuaaggcgccggcgau

SEQ ID NO: 556 - RNA, 19 nt, Homo sapiens
aucgccggcgccuuaauau

SEQ ID NO: 557 - RNA, 19 nt, Homo sapiens
uauuaaggcgccggcgauc

SEQ ID NO: 558 - RNA, 19 nt, Homo sapiens
gaucgccggcgccuuaaua

SEQ ID NO: 559 - RNA, 19 nt, Homo sapiens
auuaaggcgccggcgaucg

SEQ ID NO: 560 - RNA, 19 nt, Homo sapiens
cgaucgccggcgccuuaau

SEQ ID NO: 561 - RNA, 19 nt, Homo sapiens
uuaaggcgccggcgaucgc

SEQ ID NO: 562 - RNA, 19 nt, Homo sapiens
gcgaucgccggcgccuuaa

SEQ ID NO: 563 - RNA, 19 nt, Homo sapiens
uaaggcgccggcgaucgcg

SEQ ID NO: 564 - RNA, 19 nt, Homo sapiens
cgcgaucgccggcgccuua

SEQ ID NO: 565 - RNA, 19 nt, Homo sapiens
aaggcgccggcgaucgcgg

SEQ ID NO: 566 - RNA, 19 nt, Homo sapiens
ccgcgaucgccggcgccuu

SEQ ID NO: 567 - RNA, 19 nt, Homo sapiens
aggcgccggcgaucgcggc

SEQ ID NO: 568 - RNA, 19 nt, Homo sapiens
gccgcgaucgccggcgccu

SEQ ID NO: 569 - RNA, 19 nt, Homo sapiens
ggcgccggcgaucgcggcc

SEQ ID NO: 570 - RNA, 19 nt, Homo sapiens
ggccgcgaucgccggcgcc

SEQ ID NO: 571 - RNA, 19 nt, Homo sapiens
gcgccggcgaucgcggccu

SEQ ID NO: 572 - RNA, 19 nt, Homo sapiens
aggccgcgaucgccggcgc

SEQ ID NO: 573 - RNA, 19 nt, Homo sapiens
cgccggcgaucgcggccug

SEQ ID NO: 574 - RNA, 19 nt, Homo sapiens
caggccgcgaucgccggcg

SEQ ID NO: 575 - RNA, 19 nt, Homo sapiens
cuugagugcccgccuccuu

SEQ ID NO: 576 - RNA, 19 nt, Homo sapiens
aaggaggcgggcacucaag

SEQ ID NO: 577 - RNA, 19 nt, Homo sapiens
uugagugcccgccuccuuc

SEQ ID NO: 578 - RNA, 19 nt, Homo sapiens
gaaggaggcgggcacucaa

SEQ ID NO: 579 - RNA, 19 nt, Homo sapiens
ugagugcccgccuccuucg

SEQ ID NO: 580 - RNA, 19 nt, Homo sapiens
cgaaggaggcgggcacuca

SEQ ID NO: 581 - RNA, 19 nt, Homo sapiens
gagugcccgccuccuucgc

SEQ ID NO: 582 - RNA, 19 nt, Homo sapiens
gcgaaggaggcgggcacuc

SEQ ID NO: 583 - RNA, 19 nt, Homo sapiens
agugcccgccuccuucgcc

SEQ ID NO: 584 - RNA, 19 nt, Homo sapiens
ggcgaaggaggcgggcacu

SEQ ID NO: 585 - RNA, 19 nt, Homo sapiens
gugcccgccuccuucgccg

SEQ ID NO: 586 - RNA, 19 nt, Homo sapiens
cggcgaaggaggcgggcac

SEQ ID NO: 587 - RNA, 19 nt, Homo sapiens
ugcccgccuccuucgccgc

SEQ ID NO: 588 - RNA, 19 nt, Homo sapiens
gcggcgaaggaggcgggca

SEQ ID NO: 589 - RNA, 19 nt, Homo sapiens
gcccgccuccuucgccgcc

SEQ ID NO: 590 - RNA, 19 nt, Homo sapiens
ggcggcgaaggaggcgggc

SEQ ID NO: 591 - RNA, 19 nt, Homo sapiens
cccgccuccuucgccgccg

SEQ ID NO: 592 - RNA, 19 nt, Homo sapiens
cggcggcgaaggaggcggg

SEQ ID NO: 593 - RNA, 19 nt, Homo sapiens
ccgccuccuucgccgccgc

SEQ ID NO: 594 - RNA, 19 nt, Homo sapiens
gcggcggcgaaggaggcgg

SEQ ID NO: 595 - RNA, 19 nt, Homo sapiens
cgccuccuucgccgccgcc

SEQ ID NO: 596 - RNA, 19 nt, Homo sapiens
ggcggcggcgaaggaggcg

SEQ ID NO: 597 - RNA, 19 nt, Homo sapiens
gccuccuucgccgccgccu

SEQ ID NO: 598 - RNA, 19 nt, Homo sapiens
aggcggcggcgaaggaggc

SEQ ID NO: 599 - RNA, 19 nt, Homo sapiens
ccuccuucgccgccgccuc

SEQ ID NO: 600 - RNA, 19 nt, Homo sapiens
gaggcggcggcgaaggagg

SEQ ID NO: 601 - RNA, 19 nt, Homo sapiens
cgcugcccauucuuauccc

SEQ ID NO: 602 - RNA, 19 nt, Homo sapiens
gggauaagaaugggcagcg

SEQ ID NO: 603 - RNA, 19 nt, Homo sapiens
gcugcccauucuuaucccg

SEQ ID NO: 604 - RNA, 19 nt, Homo sapiens
cgggauaagaaugggcagc

SEQ ID NO: 605 - RNA, 19 nt, Homo sapiens
ugcccauucuuaucccgag

SEQ ID NO: 606 - RNA, 19 nt, Homo sapiens
cucgggauaagaaugggca

SEQ ID NO: 607 - RNA, 19 nt, Homo sapiens
cccauucuuaucccgaguc

SEQ ID NO: 608 - RNA, 19 nt, Homo sapiens
gacucgggauaagaauggg

SEQ ID NO: 609 - RNA, 19 nt, Homo sapiens
ccauucuuaucccgagucc

SEQ ID NO: 610 - RNA, 19 nt, Homo sapiens
ggacucgggauaagaaugg

SEQ ID NO: 611 - RNA, 19 nt, Homo sapiens
cauucuuaucccgaguccc

SEQ ID NO: 612 - RNA, 19 nt, Homo sapiens
gggacucgggauaagaaug

SEQ ID NO: 613 - RNA, 19 nt, Homo sapiens
auucuuaucccgagucccc

SEQ ID NO: 614 - RNA, 19 nt, Homo sapiens
ggggacucgggauaagaau

SEQ ID NO: 615 - RNA, 19 nt, Homo sapiens
uucuuaucccgaguccccc

SEQ ID NO: 616 - RNA, 19 nt, Homo sapiens
gggggacucgggauaagaa

SEQ ID NO: 617 - RNA, 19 nt, Homo sapiens
ucuuaucccgaguccccca

SEQ ID NO: 618 - RNA, 19 nt, Homo sapiens
ugggggacucgggauaaga

SEQ ID NO: 619 - RNA, 19 nt, Homo sapiens
cuuaucccgagucccccag

SEQ ID NO: 620 - RNA, 19 nt, Homo sapiens
cugggggacucgggauaag

SEQ ID NO: 621 - RNA, 19 nt, Homo sapiens
uuaucccgagucccccagg

SEQ ID NO: 622 - RNA, 19 nt, Homo sapiens
ccugggggacucgggauaa

SEQ ID NO: 623 - RNA, 19 nt, Homo sapiens
uaucccgagucccccaggc

SEQ ID NO: 624 - RNA, 19 nt, Homo sapiens
gccugggggacucgggaua

SEQ ID NO: 625 - RNA, 19 nt, Homo sapiens
aucccgagucccccaggcc

SEQ ID NO: 626 - RNA, 19 nt, Homo sapiens
ggccugggggacucgggau

SEQ ID NO: 627 - RNA, 19 nt, Homo sapiens
ucccgagucccccaggccu

SEQ ID NO: 628 - RNA, 19 nt, Homo sapiens
aggccugggggacucggga

SEQ ID NO: 629 - RNA, 19 nt, Homo sapiens
cccgagucccccaggccuu

SEQ ID NO: 630 - RNA, 19 nt, Homo sapiens
aaggccugggggacucggg

SEQ ID NO: 631 - RNA, 19 nt, Homo sapiens
ccgagucccccaggccuuu

SEQ ID NO: 632 - RNA, 19 nt, Homo sapiens
aaaggccugggggacucgg

SEQ ID NO: 633 - RNA, 19 nt, Homo sapiens
cgagucccccaggccuuuc

SEQ ID NO: 634 - RNA, 19 nt, Homo sapiens
gaaaggccugggggacucg

SEQ ID NO: 635 - RNA, 19 nt, Homo sapiens
gagucccccaggccuuucu

SEQ ID NO: 636 - RNA, 19 nt, Homo sapiens
agaaaggccugggggacuc

SEQ ID NO: 637 - RNA, 19 nt, Homo sapiens
agucccccaggccuuucug

SEQ ID NO: 638 - RNA, 19 nt, Homo sapiens
cagaaaggccugggggacu

SEQ ID NO: 639 - RNA, 19 nt, Homo sapiens
gucccccaggccuuucugc

SEQ ID NO: 640 - RNA, 19 nt, Homo sapiens
gcagaaaggccugggggac

SEQ ID NO: 641 - RNA, 19 nt, Homo sapiens
ucccccaggccuuucugca

SEQ ID NO: 642 - RNA, 19 nt, Homo sapiens
ugcagaaaggccuggggga

SEQ ID NO: 643 - RNA, 19 nt, Homo sapiens
cccccaggccuuucugcag

SEQ ID NO: 644 - RNA, 19 nt, Homo sapiens
cugcagaaaggccuggggg

SEQ ID NO: 645 - RNA, 19 nt, Homo sapiens
ccccaggccuuucugcaga

SEQ ID NO: 646 - RNA, 19 nt, Homo sapiens
ucugcagaaaggccugggg

SEQ ID NO: 647 - RNA, 19 nt, Homo sapiens
cccaggccuuucugcagaa

SEQ ID NO: 648 - RNA, 19 nt, Homo sapiens
uucugcagaaaggccuggg

SEQ ID NO: 649 - RNA, 19 nt, Homo sapiens
ccaggccuuucugcagaaa

SEQ ID NO: 650 - RNA, 19 nt, Homo sapiens
uuucugcagaaaggccugg

SEQ ID NO: 651 - RNA, 19 nt, Homo sapiens
caggccuuucugcagaaag

SEQ ID NO: 652 - RNA, 19 nt, Homo sapiens
cuuucugcagaaaggccug

SEQ ID NO: 653 - RNA, 19 nt, Homo sapiens
aggccuuucugcagaaagc

SEQ ID NO: 654 - RNA, 19 nt, Homo sapiens
gcuuucugcagaaaggccu

SEQ ID NO: 655 - RNA, 19 nt, Homo sapiens
ggccuuucugcagaaagca

SEQ ID NO: 656 - RNA, 19 nt, Homo sapiens
ugcuuucugcagaaaggcc

SEQ ID NO: 657 - RNA, 19 nt, Homo sapiens
gccuuucugcagaaagcag

SEQ ID NO: 658 - RNA, 19 nt, Homo sapiens
cugcuuucugcagaaaggc

SEQ ID NO: 659 - RNA, 19 nt, Homo sapiens
ccuuucugcagaaagcagg

SEQ ID NO: 660 - RNA, 19 nt, Homo sapiens
ccugcuuucugcagaaagg

SEQ ID NO: 661 - RNA, 19 nt, Homo sapiens
cuuucugcagaaagcaggc

SEQ ID NO: 662 - RNA, 19 nt, Homo sapiens
gccugcuuucugcagaaag

SEQ ID NO: 663 - RNA, 19 nt, Homo sapiens
uuucugcagaaagcaggca

SEQ ID NO: 664 - RNA, 19 nt, Homo sapiens
ugccugcuuucugcagaaa

SEQ ID NO: 665 - RNA, 19 nt, Homo sapiens
uucugcagaaagcaggcaa

SEQ ID NO: 666 - RNA, 19 nt, Homo sapiens
uugccugcuuucugcagaa

SEQ ID NO: 667 - RNA, 19 nt, Homo sapiens
ucugcagaaagcaggcaaa

SEQ ID NO: 668 - RNA, 19 nt, Homo sapiens
uuugccugcuuucugcaga

SEQ ID NO: 669 - RNA, 19 nt, Homo sapiens
cugcagaaagcaggcaaau

SEQ ID NO: 670 - RNA, 19 nt, Homo sapiens
auuugccugcuuucugcag

SEQ ID NO: 671 - RNA, 19 nt, Homo sapiens
ugcagaaagcaggcaaauc

SEQ ID NO: 672 - RNA, 19 nt, Homo sapiens
gauuugccugcuuucugca

SEQ ID NO: 673 - RNA, 19 nt, Homo sapiens
gcagaaagcaggcaaaucu

SEQ ID NO: 674 - RNA, 19 nt, Homo sapiens
agauuugccugcuuucugc

SEQ ID NO: 675 - RNA, 19 nt, Homo sapiens
cagaaagcaggcaaaucuc

SEQ ID NO: 676 - RNA, 19 nt, Homo sapiens
gagauuugccugcuuucug

SEQ ID NO: 677 - RNA, 19 nt, Homo sapiens
agaaagcaggcaaaucucu

SEQ ID NO: 678 - RNA, 19 nt, Homo sapiens
agagauuugccugcuuucu

SEQ ID NO: 679 - RNA, 19 nt, Homo sapiens
gaaagcaggcaaaucucug

SEQ ID NO: 680 - RNA, 19 nt, Homo sapiens
cagagauuugccugcuuuc

SEQ ID NO: 681 - RNA, 19 nt, Homo sapiens
aaagcaggcaaaucucugu

SEQ ID NO: 682 - RNA, 19 nt, Homo sapiens
acagagauuugccugcuuu

SEQ ID NO: 683 - RNA, 19 nt, Homo sapiens
aagcaggcaaaucucuguu

SEQ ID NO: 684 - RNA, 19 nt, Homo sapiens
aacagagauuugccugcuu

SEQ ID NO: 685 - RNA, 19 nt, Homo sapiens
agcaggcaaaucucuguug

SEQ ID NO: 686 - RNA, 19 nt, Homo sapiens
caacagagauuugccugcu

SEQ ID NO: 687 - RNA, 19 nt, Homo sapiens
gcaggcaaaucucuguugu

SEQ ID NO: 688 - RNA, 19 nt, Homo sapiens
acaacagagauuugccugc

SEQ ID NO: 689 - RNA, 19 nt, Homo sapiens
caggcaaaucucuguuguu

SEQ ID NO: 690 - RNA, 19 nt, Homo sapiens
aacaacagagauuugccug

SEQ ID NO: 691 - RNA, 19 nt, Homo sapiens
aggcaaaucucuguuguuc

SEQ ID NO: 692 - RNA, 19 nt, Homo sapiens
gaacaacagagauuugccu

SEQ ID NO: 693 - RNA, 19 nt, Homo sapiens
gcaaaucucuguuguucua

SEQ ID NO: 694 - RNA, 19 nt, Homo sapiens
uagaacaacagagauuugc

SEQ ID NO: 695 - RNA, 19 nt, Homo sapiens
caaaucucuguuguucuau

SEQ ID NO: 696 - RNA, 19 nt, Homo sapiens
auagaacaacagagauuug

SEQ ID NO: 697 - RNA, 19 nt, Homo sapiens
aaaucucuguuguucuaug

SEQ ID NO: 698 - RNA, 19 nt, Homo sapiens
cauagaacaacagagauuu

SEQ ID NO: 699 - RNA, 19 nt, Homo sapiens
aaucucuguuguucuaugc

SEQ ID NO: 700 - RNA, 19 nt, Homo sapiens
gcauagaacaacagagauu

SEQ ID NO: 701 - RNA, 19 nt, Homo sapiens
aucucuguuguucuaugcc

SEQ ID NO: 702 - RNA, 19 nt, Homo sapiens
ggcauagaacaacagagau

SEQ ID NO: 703 - RNA, 19 nt, Homo sapiens
ucucuguuguucuaugccc

SEQ ID NO: 704 - RNA, 19 nt, Homo sapiens
gggcauagaacaacagaga

SEQ ID NO: 705 - RNA, 19 nt, Homo sapiens
cucuguuguucuaugccca

SEQ ID NO: 706 - RNA, 19 nt, Homo sapiens
ugggcauagaacaacagag

SEQ ID NO: 707 - RNA, 19 nt, Homo sapiens
ucuguuguucuaugcccaa

SEQ ID NO: 708 - RNA, 19 nt, Homo sapiens
uugggcauagaacaacaga

SEQ ID NO: 709 - RNA, 19 nt, Homo sapiens
cuguuguucuaugcccaaa

SEQ ID NO: 710 - RNA, 19 nt, Homo sapiens
uuugggcauagaacaacag

SEQ ID NO: 711 - RNA, 19 nt, Homo sapiens
uguuguucuaugcccaaaa

SEQ ID NO: 712 - RNA, 19 nt, Homo sapiens
uuuugggcauagaacaaca

SEQ ID NO: 713 - RNA, 19 nt, Homo sapiens
guuguucuaugcccaaaac

SEQ ID NO: 714 - RNA, 19 nt, Homo sapiens
guuuugggcauagaacaac

SEQ ID NO: 715 - RNA, 19 nt, Homo sapiens
uuguucuaugcccaaaacu

SEQ ID NO: 716 - RNA, 19 nt, Homo sapiens
aguuuugggcauagaacaa

SEQ ID NO: 717 - RNA, 19 nt, Homo sapiens
uguucuaugcccaaaacug

SEQ ID NO: 718 - RNA, 19 nt, Homo sapiens
caguuuugggcauagaaca

SEQ ID NO: 719 - RNA, 19 nt, Homo sapiens
guucuaugcccaaaacugc

SEQ ID NO: 720 - RNA, 19 nt, Homo sapiens
gcaguuuugggcauagaac

SEQ ID NO: 721 - RNA, 19 nt, Homo sapiens
uucuaugcccaaaacugcc

SEQ ID NO: 722 - RNA, 19 nt, Homo sapiens
ggcaguuuugggcauagaa

SEQ ID NO: 723 - RNA, 19 nt, Homo sapiens
ucuaugcccaaaacugccc

SEQ ID NO: 724 - RNA, 19 nt, Homo sapiens
gggcaguuuugggcauaga

SEQ ID NO: 725 - RNA, 19 nt, Homo sapiens
cuaugcccaaaacugcccc

SEQ ID NO: 726 - RNA, 19 nt, Homo sapiens
ggggcaguuuugggcauag

SEQ ID NO: 727 - RNA, 19 nt, Homo sapiens
uaugcccaaaacugcccca

SEQ ID NO: 728 - RNA, 19 nt, Homo sapiens
uggggcaguuuugggcaua

SEQ ID NO: 729 - RNA, 19 nt, Homo sapiens
augcccaaaacugccccaa

SEQ ID NO: 730 - RNA, 19 nt, Homo sapiens
uuggggcaguuuugggcau

SEQ ID NO: 731 - RNA, 19 nt, Homo sapiens
ugcccaaaacugccccaag

SEQ ID NO: 732 - RNA, 19 nt, Homo sapiens
cuuggggcaguuuugggca

SEQ ID NO: 733 - RNA, 19 nt, Homo sapiens
gcccaaaacugccccaaga

SEQ ID NO: 734 - RNA, 19 nt, Homo sapiens
ucuuggggcaguuuugggc

SEQ ID NO: 735 - RNA, 19 nt, Homo sapiens
cccaaaacugccccaagau

SEQ ID NO: 736 - RNA, 19 nt, Homo sapiens
aucuuggggcaguuuuggg

SEQ ID NO: 737 - RNA, 19 nt, Homo sapiens
ccaaaacugccccaagaug

SEQ ID NO: 738 - RNA, 19 nt, Homo sapiens
caucuuggggcaguuuugg

SEQ ID NO: 739 - RNA, 19 nt, Homo sapiens
aaaacugccccaagaugau

SEQ ID NO: 740 - RNA, 19 nt, Homo sapiens
aucaucuuggggcaguuuu

SEQ ID NO: 741 - RNA, 19 nt, Homo sapiens
aaacugccccaagaugaug

SEQ ID NO: 742 - RNA, 19 nt, Homo sapiens
caucaucuuggggcaguuu

SEQ ID NO: 743 - RNA, 19 nt, Homo sapiens
aacugccccaagaugaugg

SEQ ID NO: 744 - RNA, 19 nt, Homo sapiens
ccaucaucuuggggcaguu

SEQ ID NO: 745 - RNA, 19 nt, Homo sapiens
acugccccaagaugaugga

SEQ ID NO: 746 - RNA, 19 nt, Homo sapiens
uccaucaucuuggggcagu

SEQ ID NO: 747 - RNA, 19 nt, Homo sapiens
cugccccaagaugauggaa

SEQ ID NO: 748 - RNA, 19 nt, Homo sapiens
uuccaucaucuuggggcag

SEQ ID NO: 749 - RNA, 19 nt, Homo sapiens
ugccccaagaugauggaag

SEQ ID NO: 750 - RNA, 19 nt, Homo sapiens
cuuccaucaucuuggggca

SEQ ID NO: 751 - RNA, 19 nt, Homo sapiens
gccccaagaugauggaagu

SEQ ID NO: 752 - RNA, 19 nt, Homo sapiens
acuuccaucaucuuggggc

SEQ ID NO: 753 - RNA, 19 nt, Homo sapiens
cccaagaugauggaaguug

SEQ ID NO: 754 - RNA, 19 nt, Homo sapiens
caacuuccaucaucuuggg

SEQ ID NO: 755 - RNA, 19 nt, Homo sapiens
ccaagaugauggaaguugg

SEQ ID NO: 756 - RNA, 19 nt, Homo sapiens
ccaacuuccaucaucuugg

SEQ ID NO: 757 - RNA, 19 nt, Homo sapiens
caagaugauggaaguuggg

SEQ ID NO: 758 - RNA, 19 nt, Homo sapiens
cccaacuuccaucaucuug

SEQ ID NO: 759 - RNA, 19 nt, Homo sapiens
aagaugauggaaguugggg

SEQ ID NO: 760 - RNA, 19 nt, Homo sapiens
ccccaacuuccaucaucuu

SEQ ID NO: 761 - RNA, 19 nt, Homo sapiens
agaugauggaaguuggggc

SEQ ID NO: 762 - RNA, 19 nt, Homo sapiens
gccccaacuuccaucaucu

SEQ ID NO: 763 - RNA, 19 nt, Homo sapiens
gaugauggaaguuggggcc

SEQ ID NO: 764 - RNA, 19 nt, Homo sapiens
ggccccaacuuccaucauc

SEQ ID NO: 765 - RNA, 19 nt, Homo sapiens
augauggaaguuggggcca

SEQ ID NO: 766 - RNA, 19 nt, Homo sapiens
uggccccaacuuccaucau

SEQ ID NO: 767 - RNA, 19 nt, Homo sapiens
ugauggaaguuggggccaa

SEQ ID NO: 768 - RNA, 19 nt, Homo sapiens
uuggccccaacuuccauca

SEQ ID NO: 769 - RNA, 19 nt, Homo sapiens
gauggaaguuggggccaag

SEQ ID NO: 770 - RNA, 19 nt, Homo sapiens
cuuggccccaacuuccauc

SEQ ID NO: 771 - RNA, 19 nt, Homo sapiens
auggaaguuggggccaagc

SEQ ID NO: 772 - RNA, 19 nt, Homo sapiens
gcuuggccccaacuuccau

SEQ ID NO: 773 - RNA, 19 nt, Homo sapiens
uggaaguuggggccaagcc

SEQ ID NO: 774 - RNA, 19 nt, Homo sapiens
ggcuuggccccaacuucca

SEQ ID NO: 775 - RNA, 19 nt, Homo sapiens
ggaaguuggggccaagcca

SEQ ID NO: 776 - RNA, 19 nt, Homo sapiens
uggcuuggccccaacuucc

SEQ ID NO: 777 - RNA, 19 nt, Homo sapiens
gaaguuggggccaagccag

SEQ ID NO: 778 - RNA, 19 nt, Homo sapiens
cuggcuuggccccaacuuc

SEQ ID NO: 779 - RNA, 19 nt, Homo sapiens
aaguuggggccaagccagc

SEQ ID NO: 780 - RNA, 19 nt, Homo sapiens
gcuggcuuggccccaacuu

SEQ ID NO: 781 - RNA, 19 nt, Homo sapiens
aguuggggccaagccagcc

SEQ ID NO: 782 - RNA, 19 nt, Homo sapiens
ggcuggcuuggccccaacu

SEQ ID NO: 783 - RNA, 19 nt, Homo sapiens
guuggggccaagccagccc

SEQ ID NO: 784 - RNA, 19 nt, Homo sapiens
gggcuggcuuggccccaac

SEQ ID NO: 785 - RNA, 19 nt, Homo sapiens
uuggggccaagccagcccc

SEQ ID NO: 786 - RNA, 19 nt, Homo sapiens
ggggcuggcuuggccccaa

SEQ ID NO: 787 - RNA, 19 nt, Homo sapiens
uggggccaagccagccccu

SEQ ID NO: 788 - RNA, 19 nt, Homo sapiens
aggggcuggcuuggcccca

SEQ ID NO: 789 - RNA, 19 nt, Homo sapiens
ggggccaagccagccccuc

SEQ ID NO: 790 - RNA, 19 nt, Homo sapiens
gaggggcuggcuuggcccc

SEQ ID NO: 791 - RNA, 19 nt, Homo sapiens
gggccaagccagccccucg

SEQ ID NO: 792 - RNA, 19 nt, Homo sapiens
cgaggggcuggcuuggccc

SEQ ID NO: 793 - RNA, 19 nt, Homo sapiens
ggccaagccagccccucgg

SEQ ID NO: 794 - RNA, 19 nt, Homo sapiens
ccgaggggcuggcuuggcc

SEQ ID NO: 795 - RNA, 19 nt, Homo sapiens
gccaagccagccccucggg

SEQ ID NO: 796 - RNA, 19 nt, Homo sapiens
cccgaggggcuggcuuggc

SEQ ID NO: 797 - RNA, 19 nt, Homo sapiens
ccaagccagccccucgggc

SEQ ID NO: 798 - RNA, 19 nt, Homo sapiens
gcccgaggggcuggcuugg

SEQ ID NO: 799 - RNA, 19 nt, Homo sapiens
caagccagccccucgggca

SEQ ID NO: 800 - RNA, 19 nt, Homo sapiens
ugcccgaggggcuggcuug

SEQ ID NO: 801 - RNA, 19 nt, Homo sapiens
aagccagccccucgggcau

SEQ ID NO: 802 - RNA, 19 nt, Homo sapiens
augcccgaggggcuggcuu

SEQ ID NO: 803 - RNA, 19 nt, Homo sapiens
agccagccccucgggcauu

SEQ ID NO: 804 - RNA, 19 nt, Homo sapiens
aaugcccgaggggcuggcu

SEQ ID NO: 805 - RNA, 19 nt, Homo sapiens
gccagccccucgggcauug

SEQ ID NO: 806 - RNA, 19 nt, Homo sapiens
caaugcccgaggggcuggc

SEQ ID NO: 807 - RNA, 19 nt, Homo sapiens
ccagccccucgggcauugu

SEQ ID NO: 808 - RNA, 19 nt, Homo sapiens
acaaugcccgaggggcugg

SEQ ID NO: 809 - RNA, 19 nt, Homo sapiens
cagccccucgggcauuguc

SEQ ID NO: 810 - RNA, 19 nt, Homo sapiens
gacaaugcccgaggggcug

SEQ ID NO: 811 - RNA, 19 nt, Homo sapiens
agccccucgggcauugucc

SEQ ID NO: 812 - RNA, 19 nt, Homo sapiens
ggacaaugcccgaggggcu

SEQ ID NO: 813 - RNA, 19 nt, Homo sapiens
gccccucgggcauugucca

SEQ ID NO: 814 - RNA, 19 nt, Homo sapiens
uggacaaugcccgaggggc

SEQ ID NO: 815 - RNA, 19 nt, Homo sapiens
ccccucgggcauuguccac

SEQ ID NO: 816 - RNA, 19 nt, Homo sapiens
guggacaaugcccgagggg

SEQ ID NO: 817 - RNA, 19 nt, Homo sapiens
cccucgggcauuguccacu

SEQ ID NO: 818 - RNA, 19 nt, Homo sapiens
aguggacaaugcccgaggg

SEQ ID NO: 819 - RNA, 19 nt, Homo sapiens
ccucgggcauuguccacug

SEQ ID NO: 820 - RNA, 19 nt, Homo sapiens
caguggacaaugcccgagg

SEQ ID NO: 821 - RNA, 19 nt, Homo sapiens
cucgggcauuguccacugc

SEQ ID NO: 822 - RNA, 19 nt, Homo sapiens
gcaguggacaaugcccgag

SEQ ID NO: 823 - RNA, 19 nt, Homo sapiens
ucgggcauuguccacugca

SEQ ID NO: 824 - RNA, 19 nt, Homo sapiens
ugcaguggacaaugcccga

SEQ ID NO: 825 - RNA, 19 nt, Homo sapiens
cgggcauuguccacugcag

SEQ ID NO: 826 - RNA, 19 nt, Homo sapiens
cugcaguggacaaugcccg

SEQ ID NO: 827 - RNA, 19 nt, Homo sapiens
gggcauuguccacugcagc

SEQ ID NO: 828 - RNA, 19 nt, Homo sapiens
gcugcaguggacaaugccc

SEQ ID NO: 829 - RNA, 19 nt, Homo sapiens
ggcauuguccacugcagca

SEQ ID NO: 830 - RNA, 19 nt, Homo sapiens
ugcugcaguggacaaugcc

SEQ ID NO: 831 - RNA, 19 nt, Homo sapiens
gcauuguccacugcagcag

SEQ ID NO: 832 - RNA, 19 nt, Homo sapiens
cugcugcaguggacaaugc

SEQ ID NO: 833 - RNA, 19 nt, Homo sapiens
cauuguccacugcagcagu

SEQ ID NO: 834 - RNA, 19 nt, Homo sapiens
acugcugcaguggacaaug

SEQ ID NO: 835 - RNA, 19 nt, Homo sapiens
auuguccacugcagcagua

SEQ ID NO: 836 - RNA, 19 nt, Homo sapiens
uacugcugcaguggacaau

SEQ ID NO: 837 - RNA, 19 nt, Homo sapiens
uuguccacugcagcaguac

SEQ ID NO: 838 - RNA, 19 nt, Homo sapiens
guacugcugcaguggacaa

SEQ ID NO: 839 - RNA, 19 nt, Homo sapiens
uguccacugcagcaguaca

SEQ ID NO: 840 - RNA, 19 nt, Homo sapiens
uguacugcugcaguggaca

SEQ ID NO: 841 - RNA, 19 nt, Homo sapiens
guccacugcagcaguacac

SEQ ID NO: 842 - RNA, 19 nt, Homo sapiens
guguacugcugcaguggac

SEQ ID NO: 843 - RNA, 19 nt, Homo sapiens
uccacugcagcaguacacu

SEQ ID NO: 844 - RNA, 19 nt, Homo sapiens
aguguacugcugcagugga

SEQ ID NO: 845 - RNA, 19 nt, Homo sapiens
ccacugcagcaguacacua

SEQ ID NO: 846 - RNA, 19 nt, Homo sapiens
uaguguacugcugcagugg

SEQ ID NO: 847 - RNA, 19 nt, Homo sapiens
cacugcagcaguacacuac

SEQ ID NO: 848 - RNA, 19 nt, Homo sapiens
guaguguacugcugcagug

SEQ ID NO: 849 - RNA, 19 nt, Homo sapiens
acugcagcaguacacuacc

SEQ ID NO: 850 - RNA, 19 nt, Homo sapiens
gguaguguacugcugcagu

SEQ ID NO: 851 - RNA, 19 nt, Homo sapiens
cugcagcaguacacuacca

SEQ ID NO: 852 - RNA, 19 nt, Homo sapiens
ugguaguguacugcugcag

SEQ ID NO: 853 - RNA, 19 nt, Homo sapiens
ugcagcaguacacuaccaa

SEQ ID NO: 854 - RNA, 19 nt, Homo sapiens
uugguaguguacugcugca

SEQ ID NO: 855 - RNA, 19 nt, Homo sapiens
gcagcaguacacuaccaac

SEQ ID NO: 856 - RNA, 19 nt, Homo sapiens
guugguaguguacugcugc

SEQ ID NO: 857 - RNA, 19 nt, Homo sapiens
agcaguacacuaccaacag

SEQ ID NO: 858 - RNA, 19 nt, Homo sapiens
cuguugguaguguacugcu

SEQ ID NO: 859 - RNA, 19 nt, Homo sapiens
gcaguacacuaccaacaga

SEQ ID NO: 860 - RNA, 19 nt, Homo sapiens
ucuguugguaguguacugc

SEQ ID NO: 861 - RNA, 19 nt, Homo sapiens
caguacacuaccaacagau

SEQ ID NO: 862 - RNA, 19 nt, Homo sapiens
aucuguugguaguguacug

SEQ ID NO: 863 - RNA, 19 nt, Homo sapiens
aguacacuaccaacagauc

SEQ ID NO: 864 - RNA, 19 nt, Homo sapiens
gaucuguugguaguguacu

SEQ ID NO: 865 - RNA, 19 nt, Homo sapiens
guacacuaccaacagauca

SEQ ID NO: 866 - RNA, 19 nt, Homo sapiens
ugaucuguugguaguguac

SEQ ID NO: 867 - RNA, 19 nt, Homo sapiens
uacacuaccaacagaucaa

SEQ ID NO: 868 - RNA, 19 nt, Homo sapiens
uugaucuguugguagugua

SEQ ID NO: 869 - RNA, 19 nt, Homo sapiens
acacuaccaacagaucaaa

SEQ ID NO: 870 - RNA, 19 nt, Homo sapiens
uuugaucuguugguagugu

SEQ ID NO: 871 - RNA, 19 nt, Homo sapiens
cacuaccaacagaucaaag

SEQ ID NO: 872 - RNA, 19 nt, Homo sapiens
cuuugaucuguugguagug

SEQ ID NO: 873 - RNA, 19 nt, Homo sapiens
acuaccaacagaucaaaga

SEQ ID NO: 874 - RNA, 19 nt, Homo sapiens
ucuuugaucuguugguagu

SEQ ID NO: 875 - RNA, 19 nt, Homo sapiens
cuaccaacagaucaaagaa

SEQ ID NO: 876 - RNA, 19 nt, Homo sapiens
uucuuugaucuguugguag

SEQ ID NO: 877 - RNA, 19 nt, Homo sapiens
uaccaacagaucaaagaaa

SEQ ID NO: 878 - RNA, 19 nt, Homo sapiens
uuucuuugaucuguuggua

SEQ ID NO: 879 - RNA, 19 nt, Homo sapiens
accaacagaucaaagaaac

SEQ ID NO: 880 - RNA, 19 nt, Homo sapiens
guuucuuugaucuguuggu

SEQ ID NO: 881 - RNA, 19 nt, Homo sapiens
ccaacagaucaaagaaacc

SEQ ID NO: 882 - RNA, 19 nt, Homo sapiens
gguuucuuugaucuguugg

SEQ ID NO: 883 - RNA, 19 nt, Homo sapiens
uccggccagugagaaagac

SEQ ID NO: 884 - RNA, 19 nt, Homo sapiens
gucuuucucacuggccgga

SEQ ID NO: 885 - RNA, 19 nt, Homo sapiens
ccggccagugagaaagaca

SEQ ID NO: 886 - RNA, 19 nt, Homo sapiens
ugucuuucucacuggccgg

SEQ ID NO: 887 - RNA, 19 nt, Homo sapiens
cggccagugagaaagacaa

SEQ ID NO: 888 - RNA, 19 nt, Homo sapiens
uugucuuucucacuggccg

SEQ ID NO: 889 - RNA, 19 nt, Homo sapiens
ggccagugagaaagacaaa

SEQ ID NO: 890 - RNA, 19 nt, Homo sapiens
uuugucuuucucacuggcc

SEQ ID NO: 891 - RNA, 19 nt, Homo sapiens
gccagugagaaagacaaaa

SEQ ID NO: 892 - RNA, 19 nt, Homo sapiens
uuuugucuuucucacuggc

SEQ ID NO: 893 - RNA, 19 nt, Homo sapiens
ccagugagaaagacaaaac

SEQ ID NO: 894 - RNA, 19 nt, Homo sapiens
guuuugucuuucucacugg

SEQ ID NO: 895 - RNA, 19 nt, Homo sapiens
cagugagaaagacaaaacu

SEQ ID NO: 896 - RNA, 19 nt, Homo sapiens
aguuuugucuuucucacug

SEQ ID NO: 897 - RNA, 19 nt, Homo sapiens
agugagaaagacaaaacug

SEQ ID NO: 898 - RNA, 19 nt, Homo sapiens
caguuuugucuuucucacu

SEQ ID NO: 899 - RNA, 19 nt, Homo sapiens
gugagaaagacaaaacugc

SEQ ID NO: 900 - RNA, 19 nt, Homo sapiens
gcaguuuugucuuucucac

SEQ ID NO: 901 - RNA, 19 nt, Homo sapiens
cuccugauggaucccagca

SEQ ID NO: 902 - RNA, 19 nt, Homo sapiens
ugcugggauccaucaggag

SEQ ID NO: 903 - RNA, 19 nt, Homo sapiens
uccugauggaucccagcag

SEQ ID NO: 904 - RNA, 19 nt, Homo sapiens
cugcugggauccaucagga

SEQ ID NO: 905 - RNA, 19 nt, Homo sapiens
ccugauggaucccagcaga

SEQ ID NO: 906 - RNA, 19 nt, Homo sapiens
ucugcugggauccaucagg

SEQ ID NO: 907 - RNA, 19 nt, Homo sapiens
cugauggaucccagcagag

SEQ ID NO: 908 - RNA, 19 nt, Homo sapiens
cucugcugggauccaucag

SEQ ID NO: 909 - RNA, 19 nt, Homo sapiens
ugauggaucccagcagagu

SEQ ID NO: 910 - RNA, 19 nt, Homo sapiens
acucugcugggauccauca

SEQ ID NO: 911 - RNA, 19 nt, Homo sapiens
gauggaucccagcagaguc

SEQ ID NO: 912 - RNA, 19 nt, Homo sapiens
gacucugcugggauccauc

SEQ ID NO: 913 - RNA, 19 nt, Homo sapiens
auggaucccagcagagucc

SEQ ID NO: 914 - RNA, 19 nt, Homo sapiens
ggacucugcugggauccau

SEQ ID NO: 915 - RNA, 19 nt, Homo sapiens
uggaucccagcagagucca

SEQ ID NO: 916 - RNA, 19 nt, Homo sapiens
uggacucugcugggaucca

SEQ ID NO: 917 - RNA, 19 nt, Homo sapiens
ggaucccagcagaguccag

SEQ ID NO: 918 - RNA, 19 nt, Homo sapiens
cuggacucugcugggaucc

SEQ ID NO: 919 - RNA, 19 nt, Homo sapiens
gaucccagcagaguccaga

SEQ ID NO: 920 - RNA, 19 nt, Homo sapiens
ucuggacucugcugggauc

SEQ ID NO: 921 - RNA, 19 nt, Homo sapiens
aucccagcagaguccagau

SEQ ID NO: 922 - RNA, 19 nt, Homo sapiens
aucuggacucugcugggau

SEQ ID NO: 923 - RNA, 19 nt, Homo sapiens
ucccagcagaguccagaug

SEQ ID NO: 924 - RNA, 19 nt, Homo sapiens
caucuggacucugcuggga

SEQ ID NO: 925 - RNA, 19 nt, Homo sapiens
cccagcagaguccagaugg

SEQ ID NO: 926 - RNA, 19 nt, Homo sapiens
ccaucuggacucugcuggg

SEQ ID NO: 927 - RNA, 19 nt, Homo sapiens
ccagcagaguccagauggc

SEQ ID NO: 928 - RNA, 19 nt, Homo sapiens
gccaucuggacucugcugg

SEQ ID NO: 929 - RNA, 19 nt, Homo sapiens
cagcagaguccagauggca

SEQ ID NO: 930 - RNA, 19 nt, Homo sapiens
ugccaucuggacucugcug

SEQ ID NO: 931 - RNA, 19 nt, Homo sapiens
agcagaguccagauggcac

SEQ ID NO: 932 - RNA, 19 nt, Homo sapiens
gugccaucuggacucugcu

SEQ ID NO: 933 - RNA, 19 nt, Homo sapiens
gcagaguccagauggcaca

SEQ ID NO: 934 - RNA, 19 nt, Homo sapiens
ugugccaucuggacucugc

SEQ ID NO: 935 - RNA, 19 nt, Homo sapiens
cagaguccagauggcacac

SEQ ID NO: 936 - RNA, 19 nt, Homo sapiens
gugugccaucuggacucug

SEQ ID NO: 937 - RNA, 19 nt, Homo sapiens
agaguccagauggcacaca

SEQ ID NO: 938 - RNA, 19 nt, Homo sapiens
ugugugccaucuggacucu

SEQ ID NO: 939 - RNA, 19 nt, Homo sapiens
gaguccagauggcacacag

SEQ ID NO: 940 - RNA, 19 nt, Homo sapiens
cugugugccaucuggacuc

SEQ ID NO: 941 - RNA, 19 nt, Homo sapiens
aguccagauggcacacagc

SEQ ID NO: 942 - RNA, 19 nt, Homo sapiens
gcugugugccaucuggacu

SEQ ID NO: 943 - RNA, 19 nt, Homo sapiens
guccagauggcacacagcu

SEQ ID NO: 944 - RNA, 19 nt, Homo sapiens
agcugugugccaucuggac

SEQ ID NO: 945 - RNA, 19 nt, Homo sapiens
uccagauggcacacagcuu

SEQ ID NO: 946 - RNA, 19 nt, Homo sapiens
aagcugugugccaucugga

SEQ ID NO: 947 - RNA, 19 nt, Homo sapiens
ccagauggcacacagcuuc

SEQ ID NO: 948 - RNA, 19 nt, Homo sapiens
gaagcugugugccaucugg

SEQ ID NO: 949 - RNA, 19 nt, Homo sapiens
cagauggcacacagcuucc

SEQ ID NO: 950 - RNA, 19 nt, Homo sapiens
ggaagcugugugccaucug

SEQ ID NO: 951 - RNA, 19 nt, Homo sapiens
agauggcacacagcuuccg

SEQ ID NO: 952 - RNA, 19 nt, Homo sapiens
cggaagcugugugccaucu

SEQ ID NO: 953 - RNA, 19 nt, Homo sapiens
gauggcacacagcuuccgu

SEQ ID NO: 954 - RNA, 19 nt, Homo sapiens
acggaagcugugugccauc

SEQ ID NO: 955 - RNA, 19 nt, Homo sapiens
auggcacacagcuuccguc

SEQ ID NO: 956 - RNA, 19 nt, Homo sapiens
gacggaagcugugugccau

SEQ ID NO: 957 - RNA, 19 nt, Homo sapiens
uggcacacagcuuccgucu

SEQ ID NO: 958 - RNA, 19 nt, Homo sapiens
agacggaagcugugugcca

SEQ ID NO: 959 - RNA, 19 nt, Homo sapiens
ggcacacagcuuccgucug

SEQ ID NO: 960 - RNA, 19 nt, Homo sapiens
cagacggaagcugugugcc

SEQ ID NO: 961 - RNA, 19 nt, Homo sapiens
gcacacagcuuccgucugg

SEQ ID NO: 962 - RNA, 19 nt, Homo sapiens
ccagacggaagcugugugc

SEQ ID NO: 963 - RNA, 19 nt, Homo sapiens
cacacagcuuccgucugga

SEQ ID NO: 964 - RNA, 19 nt, Homo sapiens
uccagacggaagcugugug

SEQ ID NO: 965 - RNA, 19 nt, Homo sapiens
acacagcuuccgucuggac

SEQ ID NO: 966 - RNA, 19 nt, Homo sapiens
guccagacggaagcugugu

SEQ ID NO: 967 - RNA, 19 nt, Homo sapiens
cacagcuuccgucuggaca

SEQ ID NO: 968 - RNA, 19 nt, Homo sapiens
uguccagacggaagcugug

SEQ ID NO: 969 - RNA, 19 nt, Homo sapiens
acagcuuccgucuggacac

SEQ ID NO: 970 - RNA, 19 nt, Homo sapiens
guguccagacggaagcugu

SEQ ID NO: 971 - RNA, 19 nt, Homo sapiens
cagcuuccgucuggacacc

SEQ ID NO: 972 - RNA, 19 nt, Homo sapiens
gguguccagacggaagcug

SEQ ID NO: 973 - RNA, 19 nt, Homo sapiens
agcuuccgucuggacaccc

SEQ ID NO: 974 - RNA, 19 nt, Homo sapiens
ggguguccagacggaagcu

SEQ ID NO: 975 - RNA, 19 nt, Homo sapiens
gcuuccgucuggacacccc

SEQ ID NO: 976 - RNA, 19 nt, Homo sapiens
gggguguccagacggaagc

SEQ ID NO: 977 - RNA, 19 nt, Homo sapiens
cuuccgucuggacaccccu

SEQ ID NO: 978 - RNA, 19 nt, Homo sapiens
agggguguccagacggaag

SEQ ID NO: 979 - RNA, 19 nt, Homo sapiens
uuccgucuggacaccccuu

SEQ ID NO: 980 - RNA, 19 nt, Homo sapiens
aagggguguccagacggaa

SEQ ID NO: 981 - RNA, 19 nt, Homo sapiens
uccgucuggacaccccuug

SEQ ID NO: 982 - RNA, 19 nt, Homo sapiens
caagggguguccagacgga

SEQ ID NO: 983 - RNA, 19 nt, Homo sapiens
ccgucuggacaccccuugc

SEQ ID NO: 984 - RNA, 19 nt, Homo sapiens
gcaagggguguccagacgg

SEQ ID NO: 985 - RNA, 19 nt, Homo sapiens
cgucuggacaccccuugcc

SEQ ID NO: 986 - RNA, 19 nt, Homo sapiens
ggcaagggguguccagacg

SEQ ID NO: 987 - RNA, 19 nt, Homo sapiens
gucuggacaccccuugccu

SEQ ID NO: 988 - RNA, 19 nt, Homo sapiens
aggcaagggguguccagac

SEQ ID NO: 989 - RNA, 19 nt, Homo sapiens
ucuggacaccccuugccug

SEQ ID NO: 990 - RNA, 19 nt, Homo sapiens
caggcaagggguguccaga

SEQ ID NO: 991 - RNA, 19 nt, Homo sapiens
cuggacaccccuugccugc

SEQ ID NO: 992 - RNA, 19 nt, Homo sapiens
gcaggcaagggguguccag

SEQ ID NO: 993 - RNA, 19 nt, Homo sapiens
uggacaccccuugccugcc

SEQ ID NO: 994 - RNA, 19 nt, Homo sapiens
ggcaggcaaggggugucca

SEQ ID NO: 995 - RNA, 19 nt, Homo sapiens
ggacaccccuugccugcca

SEQ ID NO: 996 - RNA, 19 nt, Homo sapiens
uggcaggcaaggggugucc

SEQ ID NO: 997 - RNA, 19 nt, Homo sapiens
gacaccccuugccugccac

SEQ ID NO: 998 - RNA, 19 nt, Homo sapiens
guggcaggcaagggguguc

SEQ ID NO: 999 - RNA, 19 nt, Homo sapiens
acaccccuugccugccaca

SEQ ID NO: 1000 - RNA, 19 nt, Homo sapiens
uguggcaggcaaggggugu

SEQ ID NO: 1001 - RNA, 19 nt, Homo sapiens
caccccuugccugccacaa

SEQ ID NO: 1002 - RNA, 19 nt, Homo sapiens
uuguggcaggcaaggggug

SEQ ID NO: 1003 - RNA, 19 nt, Homo sapiens
accccuugccugccacaag

SEQ ID NO: 1004 - RNA, 19 nt, Homo sapiens
cuuguggcaggcaaggggu

SEQ ID NO: 1005 - RNA, 19 nt, Homo sapiens
ccccuugccugccacaagc

SEQ ID NO: 1006 - RNA, 19 nt, Homo sapiens
gcuuguggcaggcaagggg

SEQ ID NO: 1007 - RNA, 19 nt, Homo sapiens
cccuugccugccacaagcc

SEQ ID NO: 1008 - RNA, 19 nt, Homo sapiens
ggcuuguggcaggcaaggg

SEQ ID NO: 1009 - RNA, 19 nt, Homo sapiens
ccuugccugccacaagcca

SEQ ID NO: 1010 - RNA, 19 nt, Homo sapiens
uggcuuguggcaggcaagg

SEQ ID NO: 1011 - RNA, 19 nt, Homo sapiens
cuugccugccacaagccag

SEQ ID NO: 1012 - RNA, 19 nt, Homo sapiens
cuggcuuguggcaggcaag

SEQ ID NO: 1013 - RNA, 19 nt, Homo sapiens
uugccugccacaagccagg

SEQ ID NO: 1014 - RNA, 19 nt, Homo sapiens
ccuggcuuguggcaggcaa

SEQ ID NO: 1015 - RNA, 19 nt, Homo sapiens
ugccugccacaagccaggg

SEQ ID NO: 1016 - RNA, 19 nt, Homo sapiens
cccuggcuuguggcaggca

SEQ ID NO: 1017 - RNA, 19 nt, Homo sapiens
gccugccacaagccagggc

SEQ ID NO: 1018 - RNA, 19 nt, Homo sapiens
gcccuggcuuguggcaggc

SEQ ID NO: 1019 - RNA, 19 nt, Homo sapiens
ccugccacaagccagggca

SEQ ID NO: 1020 - RNA, 19 nt, Homo sapiens
ugcccuggcuuguggcagg

SEQ ID NO: 1021 - RNA, 19 nt, Homo sapiens
cugccacaagccagggcac

SEQ ID NO: 1022 - RNA, 19 nt, Homo sapiens
gugcccuggcuuguggcag

SEQ ID NO: 1023 - RNA, 19 nt, Homo sapiens
ugccacaagccagggcacu

SEQ ID NO: 1024 - RNA, 19 nt, Homo sapiens
agugcccuggcuuguggca

SEQ ID NO: 1025 - RNA, 19 nt, Homo sapiens
gccacaagccagggcacug

SEQ ID NO: 1026 - RNA, 19 nt, Homo sapiens
cagugcccuggcuuguggc

SEQ ID NO: 1027 - RNA, 19 nt, Homo sapiens
ccacaagccagggcacugc

SEQ ID NO: 1028 - RNA, 19 nt, Homo sapiens
gcagugcccuggcuugugg

SEQ ID NO: 1029 - RNA, 19 nt, Homo sapiens
cacaagccagggcacugca

SEQ ID NO: 1030 - RNA, 19 nt, Homo sapiens
ugcagugcccuggcuugug

SEQ ID NO: 1031 - RNA, 19 nt, Homo sapiens
acaagccagggcacugcaa

SEQ ID NO: 1032 - RNA, 19 nt, Homo sapiens
uugcagugcccuggcuugu

SEQ ID NO: 1033 - RNA, 19 nt, Homo sapiens
caagccagggcacugcaag

SEQ ID NO: 1034 - RNA, 19 nt, Homo sapiens
cuugcagugcccuggcuug

SEQ ID NO: 1035 - RNA, 19 nt, Homo sapiens
aagccagggcacugcaagc

SEQ ID NO: 1036 - RNA, 19 nt, Homo sapiens
gcuugcagugcccuggcuu

SEQ ID NO: 1037 - RNA, 19 nt, Homo sapiens
agccagggcacugcaagca

SEQ ID NO: 1038 - RNA, 19 nt, Homo sapiens
ugcuugcagugcccuggcu

SEQ ID NO: 1039 - RNA, 19 nt, Homo sapiens
gccagggcacugcaagcaa

SEQ ID NO: 1040 - RNA, 19 nt, Homo sapiens
uugcuugcagugcccuggc

SEQ ID NO: 1041 - RNA, 19 nt, Homo sapiens
ccagggcacugcaagcaaa

SEQ ID NO: 1042 - RNA, 19 nt, Homo sapiens
uuugcuugcagugcccugg

SEQ ID NO: 1043 - RNA, 19 nt, Homo sapiens
cagggcacugcaagcaaau

SEQ ID NO: 1044 - RNA, 19 nt, Homo sapiens
auuugcuugcagugcccug

SEQ ID NO: 1045 - RNA, 19 nt, Homo sapiens
agggcacugcaagcaaaug

SEQ ID NO: 1046 - RNA, 19 nt, Homo sapiens
cauuugcuugcagugcccu

SEQ ID NO: 1047 - RNA, 19 nt, Homo sapiens
gggcacugcaagcaaaugc

SEQ ID NO: 1048 - RNA, 19 nt, Homo sapiens
gcauuugcuugcagugccc

SEQ ID NO: 1049 - RNA, 19 nt, Homo sapiens
ggcacugcaagcaaaugcc

SEQ ID NO: 1050 - RNA, 19 nt, Homo sapiens
ggcauuugcuugcagugcc

SEQ ID NO: 1051 - RNA, 19 nt, Homo sapiens
gcacugcaagcaaaugccc

SEQ ID NO: 1052 - RNA, 19 nt, Homo sapiens
gggcauuugcuugcagugc

SEQ ID NO: 1053 - RNA, 19 nt, Homo sapiens
acugcaagcaaaugcccuu

SEQ ID NO: 1054 - RNA, 19 nt, Homo sapiens
aagggcauuugcuugcagu

SEQ ID NO: 1055 - RNA, 19 nt, Homo sapiens
cugcaagcaaaugcccuuu

SEQ ID NO: 1056 - RNA, 19 nt, Homo sapiens
aaagggcauuugcuugcag

SEQ ID NO: 1057 - RNA, 19 nt, Homo sapiens
ugcaagcaaaugcccuuuc

SEQ ID NO: 1058 - RNA, 19 nt, Homo sapiens
gaaagggcauuugcuugca

SEQ ID NO: 1059 - RNA, 19 nt, Homo sapiens
gcaagcaaaugcccuuucc

SEQ ID NO: 1060 - RNA, 19 nt, Homo sapiens
ggaaagggcauuugcuugc

SEQ ID NO: 1061 - RNA, 19 nt, Homo sapiens
caagcaaaugcccuuuccu

SEQ ID NO: 1062 - RNA, 19 nt, Homo sapiens
aggaaagggcauuugcuug

SEQ ID NO: 1063 - RNA, 19 nt, Homo sapiens
aagcaaaugcccuuuccug

SEQ ID NO: 1064 - RNA, 19 nt, Homo sapiens
caggaaagggcauuugcuu

SEQ ID NO: 1065 - RNA, 19 nt, Homo sapiens
agcaaaugcccuuuccugg

SEQ ID NO: 1066 - RNA, 19 nt, Homo sapiens
ccaggaaagggcauuugcu

SEQ ID NO: 1067 - RNA, 19 nt, Homo sapiens
gcaaaugcccuuuccuggc

SEQ ID NO: 1068 - RNA, 19 nt, Homo sapiens
gccaggaaagggcauuugc

SEQ ID NO: 1069 - RNA, 19 nt, Homo sapiens
caaaugcccuuuccuggca

SEQ ID NO: 1070 - RNA, 19 nt, Homo sapiens
ugccaggaaagggcauuug

SEQ ID NO: 1071 - RNA, 19 nt, Homo sapiens
aaaugcccuuuccuggcag

SEQ ID NO: 1072 - RNA, 19 nt, Homo sapiens
cugccaggaaagggcauuu

SEQ ID NO: 1073 - RNA, 19 nt, Homo sapiens
aaugcccuuuccuggcagc

SEQ ID NO: 1074 - RNA, 19 nt, Homo sapiens
gcugccaggaaagggcauu

SEQ ID NO: 1075 - RNA, 19 nt, Homo sapiens
augcccuuuccuggcagca

SEQ ID NO: 1076 - RNA, 19 nt, Homo sapiens
ugcugccaggaaagggcau

SEQ ID NO: 1077 - RNA, 19 nt, Homo sapiens
ugcccuuuccuggcagcac

SEQ ID NO: 1078 - RNA, 19 nt, Homo sapiens
gugcugccaggaaagggca

SEQ ID NO: 1079 - RNA, 19 nt, Homo sapiens
gcccuuuccuggcagcaca

SEQ ID NO: 1080 - RNA, 19 nt, Homo sapiens
ugugcugccaggaaagggc

SEQ ID NO: 1081 - RNA, 19 nt, Homo sapiens
cccuuuccuggcagcacag

SEQ ID NO: 1082 - RNA, 19 nt, Homo sapiens
cugugcugccaggaaaggg

SEQ ID NO: 1083 - RNA, 19 nt, Homo sapiens
ccuuuccuggcagcacaga

SEQ ID NO: 1084 - RNA, 19 nt, Homo sapiens
ucugugcugccaggaaagg

SEQ ID NO: 1085 - RNA, 19 nt, Homo sapiens
cuuuccuggcagcacagau

SEQ ID NO: 1086 - RNA, 19 nt, Homo sapiens
aucugugcugccaggaaag

SEQ ID NO: 1087 - RNA, 19 nt, Homo sapiens
uuuccuggcagcacagaug

SEQ ID NO: 1088 - RNA, 19 nt, Homo sapiens
caucugugcugccaggaaa

SEQ ID NO: 1089 - RNA, 19 nt, Homo sapiens
uuccuggcagcacagauga

SEQ ID NO: 1090 - RNA, 19 nt, Homo sapiens
ucaucugugcugccaggaa

SEQ ID NO: 1091 - RNA, 19 nt, Homo sapiens
uccuggcagcacagaugaa

SEQ ID NO: 1092 - RNA, 19 nt, Homo sapiens
uucaucugugcugccagga

SEQ ID NO: 1093 - RNA, 19 nt, Homo sapiens
ccuggcagcacagaugaau

SEQ ID NO: 1094 - RNA, 19 nt, Homo sapiens
auucaucugugcugccagg

SEQ ID NO: 1095 - RNA, 19 nt, Homo sapiens
cuggcagcacagaugaauc

SEQ ID NO: 1096 - RNA, 19 nt, Homo sapiens
gauucaucugugcugccag

SEQ ID NO: 1097 - RNA, 19 nt, Homo sapiens
ggcagcacagaugaaucag

SEQ ID NO: 1098 - RNA, 19 nt, Homo sapiens
cugauucaucugugcugcc

SEQ ID NO: 1099 - RNA, 19 nt, Homo sapiens
cagcacagaugaaucagag

SEQ ID NO: 1100 - RNA, 19 nt, Homo sapiens
cucugauucaucugugcug

SEQ ID NO: 1101 - RNA, 19 nt, Homo sapiens
ggcagcagugucuucugca

SEQ ID NO: 1102 - RNA, 19 nt, Homo sapiens
ugcagaagacacugcugcc

SEQ ID NO: 1103 - RNA, 19 nt, Homo sapiens
gcagcagugucuucugcaa

SEQ ID NO: 1104 - RNA, 19 nt, Homo sapiens
uugcagaagacacugcugc

SEQ ID NO: 1105 - RNA, 19 nt, Homo sapiens
cagcagugucuucugcaaa

SEQ ID NO: 1106 - RNA, 19 nt, Homo sapiens
uuugcagaagacacugcug

SEQ ID NO: 1107 - RNA, 19 nt, Homo sapiens
agcagugucuucugcaaag

SEQ ID NO: 1108 - RNA, 19 nt, Homo sapiens
cuuugcagaagacacugcu

SEQ ID NO: 1109 - RNA, 19 nt, Homo sapiens
gcagugucuucugcaaagc

SEQ ID NO: 1110 - RNA, 19 nt, Homo sapiens
gcuuugcagaagacacugc

SEQ ID NO: 1111 - RNA, 19 nt, Homo sapiens
cagugucuucugcaaagcc

SEQ ID NO: 1112 - RNA, 19 nt, Homo sapiens
ggcuuugcagaagacacug

SEQ ID NO: 1113 - RNA, 19 nt, Homo sapiens
agugucuucugcaaagcca

SEQ ID NO: 1114 - RNA, 19 nt, Homo sapiens
uggcuuugcagaagacacu

SEQ ID NO: 1115 - RNA, 19 nt, Homo sapiens
gugucuucugcaaagccag

SEQ ID NO: 1116 - RNA, 19 nt, Homo sapiens
cuggcuuugcagaagacac

SEQ ID NO: 1117 - RNA, 19 nt, Homo sapiens
ugucuucugcaaagccagu

SEQ ID NO: 1118 - RNA, 19 nt, Homo sapiens
acuggcuuugcagaagaca

SEQ ID NO: 1119 - RNA, 19 nt, Homo sapiens
gucuucugcaaagccaguc

SEQ ID NO: 1120 - RNA, 19 nt, Homo sapiens
gacuggcuuugcagaagac

SEQ ID NO: 1121 - RNA, 19 nt, Homo sapiens
ucuucugcaaagccagucu

SEQ ID NO: 1122 - RNA, 19 nt, Homo sapiens
agacuggcuuugcagaaga

SEQ ID NO: 1123 - RNA, 19 nt, Homo sapiens
cuucugcaaagccagucuu

SEQ ID NO: 1124 - RNA, 19 nt, Homo sapiens
aagacuggcuuugcagaag

SEQ ID NO: 1125 - RNA, 19 nt, Homo sapiens
uucugcaaagccagucuug

SEQ ID NO: 1126 - RNA, 19 nt, Homo sapiens
caagacuggcuuugcagaa

SEQ ID NO: 1127 - RNA, 19 nt, Homo sapiens
ucugcaaagccagucuuga

SEQ ID NO: 1128 - RNA, 19 nt, Homo sapiens
ucaagacuggcuuugcaga

SEQ ID NO: 1129 - RNA, 19 nt, Homo sapiens
cugcaaagccagucuugag

SEQ ID NO: 1130 - RNA, 19 nt, Homo sapiens
cucaagacuggcuuugcag

SEQ ID NO: 1131 - RNA, 19 nt, Homo sapiens
ugcaaagccagucuugagc

SEQ ID NO: 1132 - RNA, 19 nt, Homo sapiens
gcucaagacuggcuuugca

SEQ ID NO: 1133 - RNA, 19 nt, Homo sapiens
gcaaagccagucuugagcu

SEQ ID NO: 1134 - RNA, 19 nt, Homo sapiens
agcucaagacuggcuuugc

SEQ ID NO: 1135 - RNA, 19 nt, Homo sapiens
caaagccagucuugagcuu

SEQ ID NO: 1136 - RNA, 19 nt, Homo sapiens
aagcucaagacuggcuuug

SEQ ID NO: 1137 - RNA, 19 nt, Homo sapiens
aaagccagucuugagcuuc

SEQ ID NO: 1138 - RNA, 19 nt, Homo sapiens
gaagcucaagacuggcuuu

SEQ ID NO: 1139 - RNA, 19 nt, Homo sapiens
aagccagucuugagcuuca

SEQ ID NO: 1140 - RNA, 19 nt, Homo sapiens
ugaagcucaagacuggcuu

SEQ ID NO: 1141 - RNA, 19 nt, Homo sapiens
agccagucuugagcuucag

SEQ ID NO: 1142 - RNA, 19 nt, Homo sapiens
cugaagcucaagacuggcu

SEQ ID NO: 1143 - RNA, 19 nt, Homo sapiens
gccagucuugagcuucagg

SEQ ID NO: 1144 - RNA, 19 nt, Homo sapiens
ccugaagcucaagacuggc

SEQ ID NO: 1145 - RNA, 19 nt, Homo sapiens
ccagucuugagcuucagga

SEQ ID NO: 1146 - RNA, 19 nt, Homo sapiens
uccugaagcucaagacugg

SEQ ID NO: 1147 - RNA, 19 nt, Homo sapiens
cagucuugagcuucaggag

SEQ ID NO: 1148 - RNA, 19 nt, Homo sapiens
cuccugaagcucaagacug

SEQ ID NO: 1149 - RNA, 19 nt, Homo sapiens
agucuugagcuucaggagg

SEQ ID NO: 1150 - RNA, 19 nt, Homo sapiens
ccuccugaagcucaagacu

SEQ ID NO: 1151 - RNA, 19 nt, Homo sapiens
gucuugagcuucaggagga

SEQ ID NO: 1152 - RNA, 19 nt, Homo sapiens
uccuccugaagcucaagac

SEQ ID NO: 1153 - RNA, 19 nt, Homo sapiens
ucuugagcuucaggaggau

SEQ ID NO: 1154 - RNA, 19 nt, Homo sapiens
auccuccugaagcucaaga

SEQ ID NO: 1155 - RNA, 19 nt, Homo sapiens
cuugagcuucaggaggaug

SEQ ID NO: 1156 - RNA, 19 nt, Homo sapiens
cauccuccugaagcucaag

SEQ ID NO: 1157 - RNA, 19 nt, Homo sapiens
uugagcuucaggaggaugu

SEQ ID NO: 1158 - RNA, 19 nt, Homo sapiens
acauccuccugaagcucaa

SEQ ID NO: 1159 - RNA, 19 nt, Homo sapiens
ugagcuucaggaggaugug

SEQ ID NO: 1160 - RNA, 19 nt, Homo sapiens
cacauccuccugaagcuca

SEQ ID NO: 1161 - RNA, 19 nt, Homo sapiens
gagcuucaggaggaugugc

SEQ ID NO: 1162 - RNA, 19 nt, Homo sapiens
gcacauccuccugaagcuc

SEQ ID NO: 1163 - RNA, 19 nt, Homo sapiens
agcuucaggaggaugugca

SEQ ID NO: 1164 - RNA, 19 nt, Homo sapiens
ugcacauccuccugaagcu

SEQ ID NO: 1165 - RNA, 19 nt, Homo sapiens
gcuucaggaggaugugcag

SEQ ID NO: 1166 - RNA, 19 nt, Homo sapiens
cugcacauccuccugaagc

SEQ ID NO: 1167 - RNA, 19 nt, Homo sapiens
cuucaggaggaugugcagg

SEQ ID NO: 1168 - RNA, 19 nt, Homo sapiens
ccugcacauccuccugaag

SEQ ID NO: 1169 - RNA, 19 nt, Homo sapiens
uucaggaggaugugcagga

SEQ ID NO: 1170 - RNA, 19 nt, Homo sapiens
uccugcacauccuccugaa

SEQ ID NO: 1171 - RNA, 19 nt, Homo sapiens
ucaggaggaugugcaggaa

SEQ ID NO: 1172 - RNA, 19 nt, Homo sapiens
uuccugcacauccuccuga

SEQ ID NO: 1173 - RNA, 19 nt, Homo sapiens
caggaggaugugcaggaaa

SEQ ID NO: 1174 - RNA, 19 nt, Homo sapiens
uuuccugcacauccuccug

SEQ ID NO: 1175 - RNA, 19 nt, Homo sapiens
aggaggaugugcaggaaau

SEQ ID NO: 1176 - RNA, 19 nt, Homo sapiens
auuuccugcacauccuccu

SEQ ID NO: 1177 - RNA, 19 nt, Homo sapiens
ggaggaugugcaggaaaug

SEQ ID NO: 1178 - RNA, 19 nt, Homo sapiens
cauuuccugcacauccucc

SEQ ID NO: 1179 - RNA, 19 nt, Homo sapiens
gaggaugugcaggaaauga

SEQ ID NO: 1180 - RNA, 19 nt, Homo sapiens
ucauuuccugcacauccuc

SEQ ID NO: 1181 - RNA, 19 nt, Homo sapiens
aggaugugcaggaaaugaa

SEQ ID NO: 1182 - RNA, 19 nt, Homo sapiens
uucauuuccugcacauccu

SEQ ID NO: 1183 - RNA, 19 nt, Homo sapiens
ggaugugcaggaaaugaau

SEQ ID NO: 1184 - RNA, 19 nt, Homo sapiens
auucauuuccugcacaucc

SEQ ID NO: 1185 - RNA, 19 nt, Homo sapiens
gaugugcaggaaaugaaug

SEQ ID NO: 1186 - RNA, 19 nt, Homo sapiens
cauucauuuccugcacauc

SEQ ID NO: 1187 - RNA, 19 nt, Homo sapiens
augugcaggaaaugaaugc

SEQ ID NO: 1188 - RNA, 19 nt, Homo sapiens
gcauucauuuccugcacau

SEQ ID NO: 1189 - RNA, 19 nt, Homo sapiens
gugaggaaagagguugcug

SEQ ID NO: 1190 - RNA, 19 nt, Homo sapiens
cagcaaccucuuuccucac

SEQ ID NO: 1191 - RNA, 19 nt, Homo sapiens
ugaggaaagagguugcuga

SEQ ID NO: 1192 - RNA, 19 nt, Homo sapiens
ucagcaaccucuuuccuca

SEQ ID NO: 1193 - RNA, 19 nt, Homo sapiens
gaggaaagagguugcugaa

SEQ ID NO: 1194 - RNA, 19 nt, Homo sapiens
uucagcaaccucuuuccuc

SEQ ID NO: 1195 - RNA, 19 nt, Homo sapiens
aggaaagagguugcugaaa

SEQ ID NO: 1196 - RNA, 19 nt, Homo sapiens
uuucagcaaccucuuuccu

SEQ ID NO: 1197 - RNA, 19 nt, Homo sapiens
ggaaagagguugcugaaac

SEQ ID NO: 1198 - RNA, 19 nt, Homo sapiens
guuucagcaaccucuuucc

SEQ ID NO: 1199 - RNA, 19 nt, Homo sapiens
gaaagagguugcugaaacc

SEQ ID NO: 1200 - RNA, 19 nt, Homo sapiens
gguuucagcaaccucuuuc

SEQ ID NO: 1201 - RNA, 19 nt, Homo sapiens
aaagagguugcugaaaccu

SEQ ID NO: 1202 - RNA, 19 nt, Homo sapiens
agguuucagcaaccucuuu

SEQ ID NO: 1203 - RNA, 19 nt, Homo sapiens
aagagguugcugaaaccuc

SEQ ID NO: 1204 - RNA, 19 nt, Homo sapiens
gagguuucagcaaccucuu

SEQ ID NO: 1205 - RNA, 19 nt, Homo sapiens
agagguugcugaaaccuca

SEQ ID NO: 1206 - RNA, 19 nt, Homo sapiens
ugagguuucagcaaccucu

SEQ ID NO: 1207 - RNA, 19 nt, Homo sapiens
gagguugcugaaaccucag

SEQ ID NO: 1208 - RNA, 19 nt, Homo sapiens
cugagguuucagcaaccuc

SEQ ID NO: 1209 - RNA, 19 nt, Homo sapiens
agguugcugaaaccucagc

SEQ ID NO: 1210 - RNA, 19 nt, Homo sapiens
gcugagguuucagcaaccu

SEQ ID NO: 1211 - RNA, 19 nt, Homo sapiens
gguugcugaaaccucagca

SEQ ID NO: 1212 - RNA, 19 nt, Homo sapiens
ugcugagguuucagcaacc

SEQ ID NO: 1213 - RNA, 19 nt, Homo sapiens
ccccagugugguuagugug

SEQ ID NO: 1214 - RNA, 19 nt, Homo sapiens
cacacuaaccacacugggg

SEQ ID NO: 1215 - RNA, 19 nt, Homo sapiens
agugugguuagugugaaaa

SEQ ID NO: 1216 - RNA, 19 nt, Homo sapiens
uuuucacacuaaccacacu

SEQ ID NO: 1217 - RNA, 19 nt, Homo sapiens
gugugguuagugugaaaac

SEQ ID NO: 1218 - RNA, 19 nt, Homo sapiens
guuuucacacuaaccacac

SEQ ID NO: 1219 - RNA, 19 nt, Homo sapiens
gauggaggggaucccagug

SEQ ID NO: 1220 - RNA, 19 nt, Homo sapiens
cacugggauccccuccauc

SEQ ID NO: 1221 - RNA, 19 nt, Homo sapiens
auggaggggaucccagugg

SEQ ID NO: 1222 - RNA, 19 nt, Homo sapiens
ccacugggauccccuccau

SEQ ID NO: 1223 - RNA, 19 nt, Homo sapiens
cugcugaagaacuuccagg

SEQ ID NO: 1224 - RNA, 19 nt, Homo sapiens
ccuggaaguucuucagcag

SEQ ID NO: 1225 - RNA, 19 nt, Homo sapiens
ugcugaagaacuuccagga

SEQ ID NO: 1226 - RNA, 19 nt, Homo sapiens
uccuggaaguucuucagca

SEQ ID NO: 1227 - RNA, 19 nt, Homo sapiens
gcugaagaacuuccaggac

SEQ ID NO: 1228 - RNA, 19 nt, Homo sapiens
guccuggaaguucuucagc

SEQ ID NO: 1229 - RNA, 19 nt, Homo sapiens
cugaagaacuuccaggaca

SEQ ID NO: 1230 - RNA, 19 nt, Homo sapiens
uguccuggaaguucuucag

SEQ ID NO: 1231 - RNA, 19 nt, Homo sapiens
ugaagaacuuccaggacau

SEQ ID NO: 1232 - RNA, 19 nt, Homo sapiens
auguccuggaaguucuuca

SEQ ID NO: 1233 - RNA, 19 nt, Homo sapiens
gaagaacuuccaggacauc

SEQ ID NO: 1234 - RNA, 19 nt, Homo sapiens
gauguccuggaaguucuuc

SEQ ID NO: 1235 - RNA, 19 nt, Homo sapiens
aagaacuuccaggacauca

SEQ ID NO: 1236 - RNA, 19 nt, Homo sapiens
ugauguccuggaaguucuu

SEQ ID NO: 1237 - RNA, 19 nt, Homo sapiens
agaacuuccaggacaucau

SEQ ID NO: 1238 - RNA, 19 nt, Homo sapiens
augauguccuggaaguucu

SEQ ID NO: 1239 - RNA, 19 nt, Homo sapiens
gaacuuccaggacaucaug

SEQ ID NO: 1240 - RNA, 19 nt, Homo sapiens
caugauguccuggaaguuc

SEQ ID NO: 1241 - RNA, 19 nt, Homo sapiens
aacuuccaggacaucaugc

SEQ ID NO: 1242 - RNA, 19 nt, Homo sapiens
gcaugauguccuggaaguu

SEQ ID NO: 1243 - RNA, 19 nt, Homo sapiens
acuuccaggacaucaugca

SEQ ID NO: 1244 - RNA, 19 nt, Homo sapiens
ugcaugauguccuggaagu

SEQ ID NO: 1245 - RNA, 19 nt, Homo sapiens
cuuccaggacaucaugcaa

SEQ ID NO: 1246 - RNA, 19 nt, Homo sapiens
uugcaugauguccuggaag

SEQ ID NO: 1247 - RNA, 19 nt, Homo sapiens
uuccaggacaucaugcaaa

SEQ ID NO: 1248 - RNA, 19 nt, Homo sapiens
uuugcaugauguccuggaa

SEQ ID NO: 1249 - RNA, 19 nt, Homo sapiens
uccaggacaucaugcaaaa

SEQ ID NO: 1250 - RNA, 19 nt, Homo sapiens
uuuugcaugauguccugga

SEQ ID NO: 1251 - RNA, 19 nt, Homo sapiens
ccaggacaucaugcaaaag

SEQ ID NO: 1252 - RNA, 19 nt, Homo sapiens
cuuuugcaugauguccugg

SEQ ID NO: 1253 - RNA, 19 nt, Homo sapiens
caggacaucaugcaaaagc

SEQ ID NO: 1254 - RNA, 19 nt, Homo sapiens
gcuuuugcaugauguccug

SEQ ID NO: 1255 - RNA, 19 nt, Homo sapiens
aggacaucaugcaaaagca

SEQ ID NO: 1256 - RNA, 19 nt, Homo sapiens
ugcuuuugcaugauguccu

SEQ ID NO: 1257 - RNA, 19 nt, Homo sapiens
ggacaucaugcaaaagcaa

SEQ ID NO: 1258 - RNA, 19 nt, Homo sapiens
uugcuuuugcaugaugucc

SEQ ID NO: 1259 - RNA, 19 nt, Homo sapiens
gacaucaugcaaaagcaaa

SEQ ID NO: 1260 - RNA, 19 nt, Homo sapiens
uuugcuuuugcaugauguc

SEQ ID NO: 1261 - RNA, 19 nt, Homo sapiens
acaucaugcaaaagcaaag

SEQ ID NO: 1262 - RNA, 19 nt, Homo sapiens
cuuugcuuuugcaugaugu

SEQ ID NO: 1263 - RNA, 19 nt, Homo sapiens
aucaugcaaaagcaaagac

SEQ ID NO: 1264 - RNA, 19 nt, Homo sapiens
gucuuugcuuuugcaugau

SEQ ID NO: 1265 - RNA, 19 nt, Homo sapiens
ucaugcaaaagcaaagacc

SEQ ID NO: 1266 - RNA, 19 nt, Homo sapiens
ggucuuugcuuuugcauga

SEQ ID NO: 1267 - RNA, 19 nt, Homo sapiens
caugcaaaagcaaagacca

SEQ ID NO: 1268 - RNA, 19 nt, Homo sapiens
uggucuuugcuuuugcaug

SEQ ID NO: 1269 - RNA, 19 nt, Homo sapiens
augcaaaagcaaagaccag

SEQ ID NO: 1270 - RNA, 19 nt, Homo sapiens
cuggucuuugcuuuugcau

SEQ ID NO: 1271 - RNA, 19 nt, Homo sapiens
ugcaaaagcaaagaccaga

SEQ ID NO: 1272 - RNA, 19 nt, Homo sapiens
ucuggucuuugcuuuugca

SEQ ID NO: 1273 - RNA, 19 nt, Homo sapiens
gcaaaagcaaagaccagaa

SEQ ID NO: 1274 - RNA, 19 nt, Homo sapiens
uucuggucuuugcuuuugc

SEQ ID NO: 1275 - RNA, 19 nt, Homo sapiens
caaaagcaaagaccagaaa

SEQ ID NO: 1276 - RNA, 19 nt, Homo sapiens
uuucuggucuuugcuuuug

SEQ ID NO: 1277 - RNA, 19 nt, Homo sapiens
aaaagcaaagaccagaaag

SEQ ID NO: 1278 - RNA, 19 nt, Homo sapiens
cuuucuggucuuugcuuuu

SEQ ID NO: 1279 - RNA, 19 nt, Homo sapiens
aaagcaaagaccagaaaga

SEQ ID NO: 1280 - RNA, 19 nt, Homo sapiens
ucuuucuggucuuugcuuu

SEQ ID NO: 1281 - RNA, 19 nt, Homo sapiens
aagcaaagaccagaaagag

SEQ ID NO: 1282 - RNA, 19 nt, Homo sapiens
cucuuucuggucuuugcuu

SEQ ID NO: 1283 - RNA, 19 nt, Homo sapiens
agcaaagaccagaaagagu

SEQ ID NO: 1284 - RNA, 19 nt, Homo sapiens
acucuuucuggucuuugcu

SEQ ID NO: 1285 - RNA, 19 nt, Homo sapiens
gcaaagaccagaaagagug

SEQ ID NO: 1286 - RNA, 19 nt, Homo sapiens
cacucuuucuggucuuugc

SEQ ID NO: 1287 - RNA, 19 nt, Homo sapiens
aaagaccagaaagaguguc

SEQ ID NO: 1288 - RNA, 19 nt, Homo sapiens
gacacucuuucuggucuuu

SEQ ID NO: 1289 - RNA, 19 nt, Homo sapiens
aagaccagaaagagugucu

SEQ ID NO: 1290 - RNA, 19 nt, Homo sapiens
agacacucuuucuggucuu

SEQ ID NO: 1291 - RNA, 19 nt, Homo sapiens
agaccagaaagagugucuc

SEQ ID NO: 1292 - RNA, 19 nt, Homo sapiens
gagacacucuuucuggucu

SEQ ID NO: 1293 - RNA, 19 nt, Homo sapiens
gaccagaaagagugucuca

SEQ ID NO: 1294 - RNA, 19 nt, Homo sapiens
ugagacacucuuucugguc

SEQ ID NO: 1295 - RNA, 19 nt, Homo sapiens
accagaaagagugucucau

SEQ ID NO: 1296 - RNA, 19 nt, Homo sapiens
augagacacucuuucuggu

SEQ ID NO: 1297 - RNA, 19 nt, Homo sapiens
ccagaaagagugucucauc

SEQ ID NO: 1298 - RNA, 19 nt, Homo sapiens
gaugagacacucuuucugg

SEQ ID NO: 1299 - RNA, 19 nt, Homo sapiens
gaaagagugucucaucuuc

SEQ ID NO: 1300 - RNA, 19 nt, Homo sapiens
gaagaugagacacucuuuc

SEQ ID NO: 1301 - RNA, 19 nt, Homo sapiens
agagugucucaucuucuuc

SEQ ID NO: 1302 - RNA, 19 nt, Homo sapiens
gaagaagaugagacacucu

SEQ ID NO: 1303 - RNA, 19 nt, Homo sapiens
gagugucucaucuucuuca

SEQ ID NO: 1304 - RNA, 19 nt, Homo sapiens
ugaagaagaugagacacuc

SEQ ID NO: 1305 - RNA, 19 nt, Homo sapiens
agugucucaucuucuucaa

SEQ ID NO: 1306 - RNA, 19 nt, Homo sapiens
uugaagaagaugagacacu

SEQ ID NO: 1307 - RNA, 19 nt, Homo sapiens
gugucucaucuucuucaag

SEQ ID NO: 1308 - RNA, 19 nt, Homo sapiens
cuugaagaagaugagacac

SEQ ID NO: 1309 - RNA, 19 nt, Homo sapiens
ugucucaucuucuucaaga

SEQ ID NO: 1310 - RNA, 19 nt, Homo sapiens
ucuugaagaagaugagaca

SEQ ID NO: 1311 - RNA, 19 nt, Homo sapiens
gucucaucuucuucaagau

SEQ ID NO: 1312 - RNA, 19 nt, Homo sapiens
aucuugaagaagaugagac

SEQ ID NO: 1313 - RNA, 19 nt, Homo sapiens
ucucaucuucuucaagaua

SEQ ID NO: 1314 - RNA, 19 nt, Homo sapiens
uaucuugaagaagaugaga

SEQ ID NO: 1315 - RNA, 19 nt, Homo sapiens
ucaucuucuucaagauaac

SEQ ID NO: 1316 - RNA, 19 nt, Homo sapiens
guuaucuugaagaagauga

SEQ ID NO: 1317 - RNA, 19 nt, Homo sapiens
caucuucuucaagauaacu

SEQ ID NO: 1318 - RNA, 19 nt, Homo sapiens
aguuaucuugaagaagaug

SEQ ID NO: 1319 - RNA, 19 nt, Homo sapiens
aucuucuucaagauaacuu

SEQ ID NO: 1320 - RNA, 19 nt, Homo sapiens
aaguuaucuugaagaagau

SEQ ID NO: 1321 - RNA, 19 nt, Homo sapiens
ucuucuucaagauaacuug

SEQ ID NO: 1322 - RNA, 19 nt, Homo sapiens
caaguuaucuugaagaaga

SEQ ID NO: 1323 - RNA, 19 nt, Homo sapiens
cuucuucaagauaacuugc

SEQ ID NO: 1324 - RNA, 19 nt, Homo sapiens
gcaaguuaucuugaagaag

SEQ ID NO: 1325 - RNA, 19 nt, Homo sapiens
uucuucaagauaacuugcc

SEQ ID NO: 1326 - RNA, 19 nt, Homo sapiens
ggcaaguuaucuugaagaa

SEQ ID NO: 1327 - RNA, 19 nt, Homo sapiens
ucuucaagauaacuugcca

SEQ ID NO: 1328 - RNA, 19 nt, Homo sapiens
uggcaaguuaucuugaaga

SEQ ID NO: 1329 - RNA, 19 nt, Homo sapiens
cuucaagauaacuugccaa

SEQ ID NO: 1330 - RNA, 19 nt, Homo sapiens
uuggcaaguuaucuugaag

SEQ ID NO: 1331 - RNA, 19 nt, Homo sapiens
uucaagauaacuugccaaa

SEQ ID NO: 1332 - RNA, 19 nt, Homo sapiens
uuuggcaaguuaucuugaa

SEQ ID NO: 1333 - RNA, 19 nt, Homo sapiens
ucaagauaacuugccaaaa

SEQ ID NO: 1334 - RNA, 19 nt, Homo sapiens
uuuuggcaaguuaucuuga

SEQ ID NO: 1335 - RNA, 19 nt, Homo sapiens
caagauaacuugccaaaau

SEQ ID NO: 1336 - RNA, 19 nt, Homo sapiens
auuuuggcaaguuaucuug

SEQ ID NO: 1337 - RNA, 19 nt, Homo sapiens
aagauaacuugccaaaauc

SEQ ID NO: 1338 - RNA, 19 nt, Homo sapiens
gauuuuggcaaguuaucuu

SEQ ID NO: 1339 - RNA, 19 nt, Homo sapiens
agauaacuugccaaaaucu

SEQ ID NO: 1340 - RNA, 19 nt, Homo sapiens
agauuuuggcaaguuaucu

SEQ ID NO: 1341 - RNA, 19 nt, Homo sapiens
gauaacuugccaaaaucug

SEQ ID NO: 1342 - RNA, 19 nt, Homo sapiens
cagauuuuggcaaguuauc

SEQ ID NO: 1343 - RNA, 19 nt, Homo sapiens
auaacuugccaaaaucugu

SEQ ID NO: 1344 - RNA, 19 nt, Homo sapiens
acagauuuuggcaaguuau

SEQ ID NO: 1345 - RNA, 19 nt, Homo sapiens
uaacuugccaaaaucuguu

SEQ ID NO: 1346 - RNA, 19 nt, Homo sapiens
aacagauuuuggcaaguua

SEQ ID NO: 1347 - RNA, 19 nt, Homo sapiens
aacuugccaaaaucuguuu

SEQ ID NO: 1348 - RNA, 19 nt, Homo sapiens
aaacagauuuuggcaaguu

SEQ ID NO: 1349 - RNA, 19 nt, Homo sapiens
acuugccaaaaucuguuuc

SEQ ID NO: 1350 - RNA, 19 nt, Homo sapiens
gaaacagauuuuggcaagu

SEQ ID NO: 1351 - RNA, 19 nt, Homo sapiens
cuugccaaaaucuguuucc

SEQ ID NO: 1352 - RNA, 19 nt, Homo sapiens
ggaaacagauuuuggcaag

SEQ ID NO: 1353 - RNA, 19 nt, Homo sapiens
uugccaaaaucuguuucca

SEQ ID NO: 1354 - RNA, 19 nt, Homo sapiens
uggaaacagauuuuggcaa

SEQ ID NO: 1355 - RNA, 19 nt, Homo sapiens
ugccaaaaucuguuuccac

SEQ ID NO: 1356 - RNA, 19 nt, Homo sapiens
guggaaacagauuuuggca

SEQ ID NO: 1357 - RNA, 19 nt, Homo sapiens
gccaaaaucuguuuccacu

SEQ ID NO: 1358 - RNA, 19 nt, Homo sapiens
aguggaaacagauuuuggc

SEQ ID NO: 1359 - RNA, 19 nt, Homo sapiens
ccaaaaucuguuuccacuu

SEQ ID NO: 1360 - RNA, 19 nt, Homo sapiens
aaguggaaacagauuuugg

SEQ ID NO: 1361 - RNA, 19 nt, Homo sapiens
caaaaucuguuuccacuuu

SEQ ID NO: 1362 - RNA, 19 nt, Homo sapiens
aaaguggaaacagauuuug

SEQ ID NO: 1363 - RNA, 19 nt, Homo sapiens
aaaaucuguuuccacuuuu

SEQ ID NO: 1364 - RNA, 19 nt, Homo sapiens
aaaaguggaaacagauuuu

SEQ ID NO: 1365 - RNA, 19 nt, Homo sapiens
aaaucuguuuccacuuuuc

SEQ ID NO: 1366 - RNA, 19 nt, Homo sapiens
gaaaaguggaaacagauuu

SEQ ID NO: 1367 - RNA, 19 nt, Homo sapiens
aaucuguuuccacuuuuca

SEQ ID NO: 1368 - RNA, 19 nt, Homo sapiens
ugaaaaguggaaacagauu

SEQ ID NO: 1369 - RNA, 19 nt, Homo sapiens
aucuguuuccacuuuucag

SEQ ID NO: 1370 - RNA, 19 nt, Homo sapiens
cugaaaaguggaaacagau

SEQ ID NO: 1371 - RNA, 19 nt, Homo sapiens
uguuuccacuuuucaguau

SEQ ID NO: 1372 - RNA, 19 nt, Homo sapiens
auacugaaaaguggaaaca

SEQ ID NO: 1373 - RNA, 19 nt, Homo sapiens
guuuccacuuuucaguaug

SEQ ID NO: 1374 - RNA, 19 nt, Homo sapiens
cauacugaaaaguggaaac

SEQ ID NO: 1375 - RNA, 19 nt, Homo sapiens
uuuccacuuuucaguauga

SEQ ID NO: 1376 - RNA, 19 nt, Homo sapiens
ucauacugaaaaguggaaa

SEQ ID NO: 1377 - RNA, 19 nt, Homo sapiens
uuccacuuuucaguaugau

SEQ ID NO: 1378 - RNA, 19 nt, Homo sapiens
aucauacugaaaaguggaa

SEQ ID NO: 1379 - RNA, 19 nt, Homo sapiens
uccacuuuucaguaugauc

SEQ ID NO: 1380 - RNA, 19 nt, Homo sapiens
gaucauacugaaaagugga

SEQ ID NO: 1381 - RNA, 19 nt, Homo sapiens
ccacuuuucaguaugaucg

SEQ ID NO: 1382 - RNA, 19 nt, Homo sapiens
cgaucauacugaaaagugg

SEQ ID NO: 1383 - RNA, 19 nt, Homo sapiens
uuuucaguaugaucguuuc

SEQ ID NO: 1384 - RNA, 19 nt, Homo sapiens
gaaacgaucauacugaaaa

SEQ ID NO: 1385 - RNA, 19 nt, Homo sapiens
caguaugaucguuucuuug

SEQ ID NO: 1386 - RNA, 19 nt, Homo sapiens
caaagaaacgaucauacug

SEQ ID NO: 1387 - RNA, 19 nt, Homo sapiens
aguaugaucguuucuuuga

SEQ ID NO: 1388 - RNA, 19 nt, Homo sapiens
ucaaagaaacgaucauacu

SEQ ID NO: 1389 - RNA, 19 nt, Homo sapiens
guaugaucguuucuuugag

SEQ ID NO: 1390 - RNA, 19 nt, Homo sapiens
cucaaagaaacgaucauac

SEQ ID NO: 1391 - RNA, 19 nt, Homo sapiens
augaucguuucuuugagaa

SEQ ID NO: 1392 - RNA, 19 nt, Homo sapiens
uucucaaagaaacgaucau

SEQ ID NO: 1393 - RNA, 19 nt, Homo sapiens
ugaucguuucuuugagaaa

SEQ ID NO: 1394 - RNA, 19 nt, Homo sapiens
uuucucaaagaaacgauca

SEQ ID NO: 1395 - RNA, 19 nt, Homo sapiens
aucguuucuuugagaaaaa

SEQ ID NO: 1396 - RNA, 19 nt, Homo sapiens
uuuuucucaaagaaacgau

SEQ ID NO: 1397 - RNA, 19 nt, Homo sapiens
ucguuucuuugagaaaaaa

SEQ ID NO: 1398 - RNA, 19 nt, Homo sapiens
uuuuuucucaaagaaacga

SEQ ID NO: 1399 - RNA, 19 nt, Homo sapiens
cguuucuuugagaaaaaaa

SEQ ID NO: 1400 - RNA, 19 nt, Homo sapiens
uuuuuuucucaaagaaacg

SEQ ID NO: 1401 - RNA, 19 nt, Homo sapiens
guuucuuugagaaaaaaau

SEQ ID NO: 1402 - RNA, 19 nt, Homo sapiens
auuuuuuucucaaagaaac

SEQ ID NO: 1403 - RNA, 19 nt, Homo sapiens
uuucuuugagaaaaaaauu

SEQ ID NO: 1404 - RNA, 19 nt, Homo sapiens
aauuuuuuucucaaagaaa

SEQ ID NO: 1405 - RNA, 19 nt, Homo sapiens
uucuuugagaaaaaaauug

SEQ ID NO: 1406 - RNA, 19 nt, Homo sapiens
caauuuuuuucucaaagaa

SEQ ID NO: 1407 - RNA, 19 nt, Homo sapiens
ucuuugagaaaaaaauuga

SEQ ID NO: 1408 - RNA, 19 nt, Homo sapiens
ucaauuuuuuucucaaaga

SEQ ID NO: 1409 - RNA, 19 nt, Homo sapiens
cuuugagaaaaaaauugau

SEQ ID NO: 1410 - RNA, 19 nt, Homo sapiens
aucaauuuuuuucucaaag

SEQ ID NO: 1411 - RNA, 19 nt, Homo sapiens
uuugagaaaaaaauugaug

SEQ ID NO: 1412 - RNA, 19 nt, Homo sapiens
caucaauuuuuuucucaaa

SEQ ID NO: 1413 - RNA, 19 nt, Homo sapiens
uugagaaaaaaauugauga

SEQ ID NO: 1414 - RNA, 19 nt, Homo sapiens
ucaucaauuuuuuucucaa

SEQ ID NO: 1415 - RNA, 19 nt, Homo sapiens
ugagaaaaaaauugaugag

SEQ ID NO: 1416 - RNA, 19 nt, Homo sapiens
cucaucaauuuuuuucuca

SEQ ID NO: 1417 - RNA, 19 nt, Homo sapiens
gagaaaaaaauugaugaga

SEQ ID NO: 1418 - RNA, 19 nt, Homo sapiens
ucucaucaauuuuuuucuc

SEQ ID NO: 1419 - RNA, 19 nt, Homo sapiens
agaaaaaaauugaugagaa

SEQ ID NO: 1420 - RNA, 19 nt, Homo sapiens
uucucaucaauuuuuuucu

SEQ ID NO: 1421 - RNA, 19 nt, Homo sapiens
gaaaaaaauugaugagaaa

SEQ ID NO: 1422 - RNA, 19 nt, Homo sapiens
uuucucaucaauuuuuuuc

SEQ ID NO: 1423 - RNA, 19 nt, Homo sapiens
aaaaaaauugaugagaaaa

SEQ ID NO: 1424 - RNA, 19 nt, Homo sapiens
uuuucucaucaauuuuuuu

SEQ ID NO: 1425 - RNA, 19 nt, Homo sapiens
aaaaaauugaugagaaaaa

SEQ ID NO: 1426 - RNA, 19 nt, Homo sapiens
uuuuucucaucaauuuuuu

SEQ ID NO: 1427 - RNA, 19 nt, Homo sapiens
aaaaauugaugagaaaaag

SEQ ID NO: 1428 - RNA, 19 nt, Homo sapiens
cuuuuucucaucaauuuuu

SEQ ID NO: 1429 - RNA, 19 nt, Homo sapiens
aaaauugaugagaaaaaga

SEQ ID NO: 1430 - RNA, 19 nt, Homo sapiens
ucuuuuucucaucaauuuu

SEQ ID NO: 1431 - RNA, 19 nt, Homo sapiens
aaauugaugagaaaaagaa

SEQ ID NO: 1432 - RNA, 19 nt, Homo sapiens
uucuuuuucucaucaauuu

SEQ ID NO: 1433 - RNA, 19 nt, Homo sapiens
aauugaugagaaaaagaau

SEQ ID NO: 1434 - RNA, 19 nt, Homo sapiens
auucuuuuucucaucaauu

SEQ ID NO: 1435 - RNA, 19 nt, Homo sapiens
auugaugagaaaaagaaug

SEQ ID NO: 1436 - RNA, 19 nt, Homo sapiens
cauucuuuuucucaucaau

SEQ ID NO: 1437 - RNA, 19 nt, Homo sapiens
uugaugagaaaaagaauga

SEQ ID NO: 1438 - RNA, 19 nt, Homo sapiens
ucauucuuuuucucaucaa

SEQ ID NO: 1439 - RNA, 19 nt, Homo sapiens
ugaugagaaaaagaaugac

SEQ ID NO: 1440 - RNA, 19 nt, Homo sapiens
gucauucuuuuucucauca

SEQ ID NO: 1441 - RNA, 19 nt, Homo sapiens
gaugagaaaaagaaugacc

SEQ ID NO: 1442 - RNA, 19 nt, Homo sapiens
ggucauucuuuuucucauc

SEQ ID NO: 1443 - RNA, 19 nt, Homo sapiens
augagaaaaagaaugacca

SEQ ID NO: 1444 - RNA, 19 nt, Homo sapiens
uggucauucuuuuucucau

SEQ ID NO: 1445 - RNA, 19 nt, Homo sapiens
ugagaaaaagaaugaccac

SEQ ID NO: 1446 - RNA, 19 nt, Homo sapiens
guggucauucuuuuucuca

SEQ ID NO: 1447 - RNA, 19 nt, Homo sapiens
gagaaaaagaaugaccaca

SEQ ID NO: 1448 - RNA, 19 nt, Homo sapiens
uguggucauucuuuuucuc

SEQ ID NO: 1449 - RNA, 19 nt, Homo sapiens
agaaaaagaaugaccacac

SEQ ID NO: 1450 - RNA, 19 nt, Homo sapiens
guguggucauucuuuuucu

SEQ ID NO: 1451 - RNA, 19 nt, Homo sapiens
gaaaaagaaugaccacacc

SEQ ID NO: 1452 - RNA, 19 nt, Homo sapiens
gguguggucauucuuuuuc

SEQ ID NO: 1453 - RNA, 19 nt, Homo sapiens
aaaaagaaugaccacaccu

SEQ ID NO: 1454 - RNA, 19 nt, Homo sapiens
agguguggucauucuuuuu

SEQ ID NO: 1455 - RNA, 19 nt, Homo sapiens
aaaagaaugaccacaccua

SEQ ID NO: 1456 - RNA, 19 nt, Homo sapiens
uagguguggucauucuuuu

SEQ ID NO: 1457 - RNA, 19 nt, Homo sapiens
aaagaaugaccacaccuau

SEQ ID NO: 1458 - RNA, 19 nt, Homo sapiens
auagguguggucauucuuu

SEQ ID NO: 1459 - RNA, 19 nt, Homo sapiens
aagaaugaccacaccuauc

SEQ ID NO: 1460 - RNA, 19 nt, Homo sapiens
gauagguguggucauucuu

SEQ ID NO: 1461 - RNA, 19 nt, Homo sapiens
agaaugaccacaccuaucg

SEQ ID NO: 1462 - RNA, 19 nt, Homo sapiens
cgauagguguggucauucu

SEQ ID NO: 1463 - RNA, 19 nt, Homo sapiens
gaaugaccacaccuaucga

SEQ ID NO: 1464 - RNA, 19 nt, Homo sapiens
ucgauagguguggucauuc

SEQ ID NO: 1465 - RNA, 19 nt, Homo sapiens
aaugaccacaccuaucgag

SEQ ID NO: 1466 - RNA, 19 nt, Homo sapiens
cucgauagguguggucauu

SEQ ID NO: 1467 - RNA, 19 nt, Homo sapiens
augaccacaccuaucgagu

SEQ ID NO: 1468 - RNA, 19 nt, Homo sapiens
acucgauagguguggucau

SEQ ID NO: 1469 - RNA, 19 nt, Homo sapiens
ccacaccuaucgaguuuuu

SEQ ID NO: 1470 - RNA, 19 nt, Homo sapiens
aaaaacucgauaggugugg

SEQ ID NO: 1471 - RNA, 19 nt, Homo sapiens
cacaccuaucgaguuuuua

SEQ ID NO: 1472 - RNA, 19 nt, Homo sapiens
uaaaaacucgauaggugug

SEQ ID NO: 1473 - RNA, 19 nt, Homo sapiens
acaccuaucgaguuuuuaa

SEQ ID NO: 1474 - RNA, 19 nt, Homo sapiens
uuaaaaacucgauaggugu

SEQ ID NO: 1475 - RNA, 19 nt, Homo sapiens
caccuaucgaguuuuuaaa

SEQ ID NO: 1476 - RNA, 19 nt, Homo sapiens
uuuaaaaacucgauaggug

SEQ ID NO: 1477 - RNA, 19 nt, Homo sapiens
accuaucgaguuuuuaaaa

SEQ ID NO: 1478 - RNA, 19 nt, Homo sapiens
uuuuaaaaacucgauaggu

SEQ ID NO: 1479 - RNA, 19 nt, Homo sapiens
ccuaucgaguuuuuaaaac

SEQ ID NO: 1480 - RNA, 19 nt, Homo sapiens
guuuuaaaaacucgauagg

SEQ ID NO: 1481 - RNA, 19 nt, Homo sapiens
cuaucgaguuuuuaaaacu

SEQ ID NO: 1482 - RNA, 19 nt, Homo sapiens
aguuuuaaaaacucgauag

SEQ ID NO: 1483 - RNA, 19 nt, Homo sapiens
uaucgaguuuuuaaaacug

SEQ ID NO: 1484 - RNA, 19 nt, Homo sapiens
caguuuuaaaaacucgaua

SEQ ID NO: 1485 - RNA, 19 nt, Homo sapiens
aucgaguuuuuaaaacugu

SEQ ID NO: 1486 - RNA, 19 nt, Homo sapiens
acaguuuuaaaaacucgau

SEQ ID NO: 1487 - RNA, 19 nt, Homo sapiens
ucgaguuuuuaaaacugug

SEQ ID NO: 1488 - RNA, 19 nt, Homo sapiens
cacaguuuuaaaaacucga

SEQ ID NO: 1489 - RNA, 19 nt, Homo sapiens
cgaguuuuuaaaacuguga

SEQ ID NO: 1490 - RNA, 19 nt, Homo sapiens
ucacaguuuuaaaaacucg

SEQ ID NO: 1491 - RNA, 19 nt, Homo sapiens
gaguuuuuaaaacugugaa

SEQ ID NO: 1492 - RNA, 19 nt, Homo sapiens
uucacaguuuuaaaaacuc

SEQ ID NO: 1493 - RNA, 19 nt, Homo sapiens
aguuuuuaaaacugugaac

SEQ ID NO: 1494 - RNA, 19 nt, Homo sapiens
guucacaguuuuaaaaacu

SEQ ID NO: 1495 - RNA, 19 nt, Homo sapiens
guuuuuaaaacugugaacc

SEQ ID NO: 1496 - RNA, 19 nt, Homo sapiens
gguucacaguuuuaaaaac

SEQ ID NO: 1497 - RNA, 19 nt, Homo sapiens
uuuuuaaaacugugaaccg

SEQ ID NO: 1498 - RNA, 19 nt, Homo sapiens
cgguucacaguuuuaaaaa

SEQ ID NO: 1499 - RNA, 19 nt, Homo sapiens
uuuuaaaacugugaaccgg

SEQ ID NO: 1500 - RNA, 19 nt, Homo sapiens
ccgguucacaguuuuaaaa

SEQ ID NO: 1501 - RNA, 19 nt, Homo sapiens
uuuaaaacugugaaccggc

SEQ ID NO: 1502 - RNA, 19 nt, Homo sapiens
gccgguucacaguuuuaaa

SEQ ID NO: 1503 - RNA, 19 nt, Homo sapiens
uuaaaacugugaaccggcg

SEQ ID NO: 1504 - RNA, 19 nt, Homo sapiens
cgccgguucacaguuuuaa

SEQ ID NO: 1505 - RNA, 19 nt, Homo sapiens
uaaaacugugaaccggcga

SEQ ID NO: 1506 - RNA, 19 nt, Homo sapiens
ucgccgguucacaguuuua

SEQ ID NO: 1507 - RNA, 19 nt, Homo sapiens
aaaacugugaaccggcgag

SEQ ID NO: 1508 - RNA, 19 nt, Homo sapiens
cucgccgguucacaguuuu

SEQ ID NO: 1509 - RNA, 19 nt, Homo sapiens
aaacugugaaccggcgagc

SEQ ID NO: 1510 - RNA, 19 nt, Homo sapiens
gcucgccgguucacaguuu

SEQ ID NO: 1511 - RNA, 19 nt, Homo sapiens
aacugugaaccggcgagca

SEQ ID NO: 1512 - RNA, 19 nt, Homo sapiens
ugcucgccgguucacaguu

SEQ ID NO: 1513 - RNA, 19 nt, Homo sapiens
acugugaaccggcgagcac

SEQ ID NO: 1514 - RNA, 19 nt, Homo sapiens
gugcucgccgguucacagu

SEQ ID NO: 1515 - RNA, 19 nt, Homo sapiens
cugugaaccggcgagcaca

SEQ ID NO: 1516 - RNA, 19 nt, Homo sapiens
ugugcucgccgguucacag

SEQ ID NO: 1517 - RNA, 19 nt, Homo sapiens
ugugaaccggcgagcacac

SEQ ID NO: 1518 - RNA, 19 nt, Homo sapiens
gugugcucgccgguucaca

SEQ ID NO: 1519 - RNA, 19 nt, Homo sapiens
gugaaccggcgagcacaca

SEQ ID NO: 1520 - RNA, 19 nt, Homo sapiens
ugugugcucgccgguucac

SEQ ID NO: 1521 - RNA, 19 nt, Homo sapiens
ugaaccggcgagcacacau

SEQ ID NO: 1522 - RNA, 19 nt, Homo sapiens
augugugcucgccgguuca

SEQ ID NO: 1523 - RNA, 19 nt, Homo sapiens
gaaccggcgagcacacauc

SEQ ID NO: 1524 - RNA, 19 nt, Homo sapiens
gaugugugcucgccgguuc

SEQ ID NO: 1525 - RNA, 19 nt, Homo sapiens
aaccggcgagcacacaucu

SEQ ID NO: 1526 - RNA, 19 nt, Homo sapiens
agaugugugcucgccgguu

SEQ ID NO: 1527 - RNA, 19 nt, Homo sapiens
accggcgagcacacaucuu

SEQ ID NO: 1528 - RNA, 19 nt, Homo sapiens
aagaugugugcucgccggu

SEQ ID NO: 1529 - RNA, 19 nt, Homo sapiens
ccggcgagcacacaucuuc

SEQ ID NO: 1530 - RNA, 19 nt, Homo sapiens
gaagaugugugcucgccgg

SEQ ID NO: 1531 - RNA, 19 nt, Homo sapiens
cggcgagcacacaucuucc

SEQ ID NO: 1532 - RNA, 19 nt, Homo sapiens
ggaagaugugugcucgccg

SEQ ID NO: 1533 - RNA, 19 nt, Homo sapiens
ggcgagcacacaucuuccc

SEQ ID NO: 1534 - RNA, 19 nt, Homo sapiens
gggaagaugugugcucgcc

SEQ ID NO: 1535 - RNA, 19 nt, Homo sapiens
auggcagaugacuauucag

SEQ ID NO: 1536 - RNA, 19 nt, Homo sapiens
cugaauagucaucugccau

SEQ ID NO: 1537 - RNA, 19 nt, Homo sapiens
ggcagaugacuauucagac

SEQ ID NO: 1538 - RNA, 19 nt, Homo sapiens
gucugaauagucaucugcc

SEQ ID NO: 1539 - RNA, 19 nt, Homo sapiens
gcagaugacuauucagacu

SEQ ID NO: 1540 - RNA, 19 nt, Homo sapiens
agucugaauagucaucugc

SEQ ID NO: 1541 - RNA, 19 nt, Homo sapiens
cagaugacuauucagacuc

SEQ ID NO: 1542 - RNA, 19 nt, Homo sapiens
gagucugaauagucaucug

SEQ ID NO: 1543 - RNA, 19 nt, Homo sapiens
agaugacuauucagacucc

SEQ ID NO: 1544 - RNA, 19 nt, Homo sapiens
ggagucugaauagucaucu

SEQ ID NO: 1545 - RNA, 19 nt, Homo sapiens
gaugacuauucagacuccc

SEQ ID NO: 1546 - RNA, 19 nt, Homo sapiens
gggagucugaauagucauc

SEQ ID NO: 1547 - RNA, 19 nt, Homo sapiens
augacuauucagacucccu

SEQ ID NO: 1548 - RNA, 19 nt, Homo sapiens
agggagucugaauagucau

SEQ ID NO: 1549 - RNA, 19 nt, Homo sapiens
ugacuauucagacucccuc

SEQ ID NO: 1550 - RNA, 19 nt, Homo sapiens
gagggagucugaauaguca

SEQ ID NO: 1551 - RNA, 19 nt, Homo sapiens
gacuauucagacucccuca

SEQ ID NO: 1552 - RNA, 19 nt, Homo sapiens
ugagggagucugaauaguc

SEQ ID NO: 1553 - RNA, 19 nt, Homo sapiens
acuauucagacucccucau

SEQ ID NO: 1554 - RNA, 19 nt, Homo sapiens
augagggagucugaauagu

SEQ ID NO: 1555 - RNA, 19 nt, Homo sapiens
cuauucagacucccucauc

SEQ ID NO: 1556 - RNA, 19 nt, Homo sapiens
gaugagggagucugaauag

SEQ ID NO: 1557 - RNA, 19 nt, Homo sapiens
uauucagacucccucauca

SEQ ID NO: 1558 - RNA, 19 nt, Homo sapiens
ugaugagggagucugaaua

SEQ ID NO: 1559 - RNA, 19 nt, Homo sapiens
auucagacucccucaucac

SEQ ID NO: 1560 - RNA, 19 nt, Homo sapiens
gugaugagggagucugaau

SEQ ID NO: 1561 - RNA, 19 nt, Homo sapiens
uucagacucccucaucacc

SEQ ID NO: 1562 - RNA, 19 nt, Homo sapiens
ggugaugagggagucugaa

SEQ ID NO: 1563 - RNA, 19 nt, Homo sapiens
ucagacucccucaucacca

SEQ ID NO: 1564 - RNA, 19 nt, Homo sapiens
uggugaugagggagucuga

SEQ ID NO: 1565 - RNA, 19 nt, Homo sapiens
cagacucccucaucaccaa

SEQ ID NO: 1566 - RNA, 19 nt, Homo sapiens
uuggugaugagggagucug

SEQ ID NO: 1567 - RNA, 19 nt, Homo sapiens
agacucccucaucaccaaa

SEQ ID NO: 1568 - RNA, 19 nt, Homo sapiens
uuuggugaugagggagucu

SEQ ID NO: 1569 - RNA, 19 nt, Homo sapiens
gacucccucaucaccaaaa

SEQ ID NO: 1570 - RNA, 19 nt, Homo sapiens
uuuuggugaugagggaguc

SEQ ID NO: 1571 - RNA, 19 nt, Homo sapiens
acucccucaucaccaaaaa

SEQ ID NO: 1572 - RNA, 19 nt, Homo sapiens
uuuuuggugaugagggagu

SEQ ID NO: 1573 - RNA, 19 nt, Homo sapiens
cucccucaucaccaaaaag

SEQ ID NO: 1574 - RNA, 19 nt, Homo sapiens
cuuuuuggugaugagggag

SEQ ID NO: 1575 - RNA, 19 nt, Homo sapiens
ucccucaucaccaaaaagc

SEQ ID NO: 1576 - RNA, 19 nt, Homo sapiens
gcuuuuuggugaugaggga

SEQ ID NO: 1577 - RNA, 19 nt, Homo sapiens
cccucaucaccaaaaagca

SEQ ID NO: 1578 - RNA, 19 nt, Homo sapiens
ugcuuuuuggugaugaggg

SEQ ID NO: 1579 - RNA, 19 nt, Homo sapiens
gugucagucuggugcagua

SEQ ID NO: 1580 - RNA, 19 nt, Homo sapiens
uacugcaccagacugacac

SEQ ID NO: 1581 - RNA, 19 nt, Homo sapiens
ugucagucuggugcaguaa

SEQ ID NO: 1582 - RNA, 19 nt, Homo sapiens
uuacugcaccagacugaca

SEQ ID NO: 1583 - RNA, 19 nt, Homo sapiens
gucagucuggugcaguaau

SEQ ID NO: 1584 - RNA, 19 nt, Homo sapiens
auuacugcaccagacugac

SEQ ID NO: 1585 - RNA, 19 nt, Homo sapiens
ucagucuggugcaguaaug

SEQ ID NO: 1586 - RNA, 19 nt, Homo sapiens
cauuacugcaccagacuga

SEQ ID NO: 1587 - RNA, 19 nt, Homo sapiens
cagucuggugcaguaauga

SEQ ID NO: 1588 - RNA, 19 nt, Homo sapiens
ucauuacugcaccagacug

SEQ ID NO: 1589 - RNA, 19 nt, Homo sapiens
agucuggugcaguaaugac

SEQ ID NO: 1590 - RNA, 19 nt, Homo sapiens
gucauuacugcaccagacu

SEQ ID NO: 1591 - RNA, 19 nt, Homo sapiens
cuggugcaguaaugacuac

SEQ ID NO: 1592 - RNA, 19 nt, Homo sapiens
guagucauuacugcaccag

SEQ ID NO: 1593 - RNA, 19 nt, Homo sapiens
uggugcaguaaugacuacc

SEQ ID NO: 1594 - RNA, 19 nt, Homo sapiens
gguagucauuacugcacca

SEQ ID NO: 1595 - RNA, 19 nt, Homo sapiens
gugcaguaaugacuaccua

SEQ ID NO: 1596 - RNA, 19 nt, Homo sapiens
uagguagucauuacugcac

SEQ ID NO: 1597 - RNA, 19 nt, Homo sapiens
ugcaguaaugacuaccuag

SEQ ID NO: 1598 - RNA, 19 nt, Homo sapiens
cuagguagucauuacugca

SEQ ID NO: 1599 - RNA, 19 nt, Homo sapiens
gcaguaaugacuaccuagg

SEQ ID NO: 1600 - RNA, 19 nt, Homo sapiens
ccuagguagucauuacugc

SEQ ID NO: 1601 - RNA, 19 nt, Homo sapiens
caguaaugacuaccuagga

SEQ ID NO: 1602 - RNA, 19 nt, Homo sapiens
uccuagguagucauuacug

SEQ ID NO: 1603 - RNA, 19 nt, Homo sapiens
aguaaugacuaccuaggaa

SEQ ID NO: 1604 - RNA, 19 nt, Homo sapiens
uuccuagguagucauuacu

SEQ ID NO: 1605 - RNA, 19 nt, Homo sapiens
guaaugacuaccuaggaau

SEQ ID NO: 1606 - RNA, 19 nt, Homo sapiens
auuccuagguagucauuac

SEQ ID NO: 1607 - RNA, 19 nt, Homo sapiens
uaaugacuaccuaggaaug

SEQ ID NO: 1608 - RNA, 19 nt, Homo sapiens
cauuccuagguagucauua

SEQ ID NO: 1609 - RNA, 19 nt, Homo sapiens
aaugacuaccuaggaauga

SEQ ID NO: 1610 - RNA, 19 nt, Homo sapiens
ucauuccuagguagucauu

SEQ ID NO: 1611 - RNA, 19 nt, Homo sapiens
augacuaccuaggaaugag

SEQ ID NO: 1612 - RNA, 19 nt, Homo sapiens
cucauuccuagguagucau

SEQ ID NO: 1613 - RNA, 19 nt, Homo sapiens
ugacuaccuaggaaugagu

SEQ ID NO: 1614 - RNA, 19 nt, Homo sapiens
acucauuccuagguaguca

SEQ ID NO: 1615 - RNA, 19 nt, Homo sapiens
gacuaccuaggaaugaguc

SEQ ID NO: 1616 - RNA, 19 nt, Homo sapiens
gacucauuccuagguaguc

SEQ ID NO: 1617 - RNA, 19 nt, Homo sapiens
acuaccuaggaaugagucg

SEQ ID NO: 1618 - RNA, 19 nt, Homo sapiens
cgacucauuccuagguagu

SEQ ID NO: 1619 - RNA, 19 nt, Homo sapiens
cuaccuaggaaugagucgc

SEQ ID NO: 1620 - RNA, 19 nt, Homo sapiens
gcgacucauuccuagguag

SEQ ID NO: 1621 - RNA, 19 nt, Homo sapiens
uaccuaggaaugagucgcc

SEQ ID NO: 1622 - RNA, 19 nt, Homo sapiens
ggcgacucauuccuaggua

SEQ ID NO: 1623 - RNA, 19 nt, Homo sapiens
accuaggaaugagucgcca

SEQ ID NO: 1624 - RNA, 19 nt, Homo sapiens
uggcgacucauuccuaggu

SEQ ID NO: 1625 - RNA, 19 nt, Homo sapiens
ccuaggaaugagucgccac

SEQ ID NO: 1626 - RNA, 19 nt, Homo sapiens
guggcgacucauuccuagg

SEQ ID NO: 1627 - RNA, 19 nt, Homo sapiens
cuaggaaugagucgccacc

SEQ ID NO: 1628 - RNA, 19 nt, Homo sapiens
gguggcgacucauuccuag

SEQ ID NO: 1629 - RNA, 19 nt, Homo sapiens
uaggaaugagucgccaccc

SEQ ID NO: 1630 - RNA, 19 nt, Homo sapiens
ggguggcgacucauuccua

SEQ ID NO: 1631 - RNA, 19 nt, Homo sapiens
aggaaugagucgccaccca

SEQ ID NO: 1632 - RNA, 19 nt, Homo sapiens
uggguggcgacucauuccu

SEQ ID NO: 1633 - RNA, 19 nt, Homo sapiens
ggaaugagucgccacccac

SEQ ID NO: 1634 - RNA, 19 nt, Homo sapiens
guggguggcgacucauucc

SEQ ID NO: 1635 - RNA, 19 nt, Homo sapiens
gaaugagucgccacccacg

SEQ ID NO: 1636 - RNA, 19 nt, Homo sapiens
cguggguggcgacucauuc

SEQ ID NO: 1637 - RNA, 19 nt, Homo sapiens
aaugagucgccacccacgg

SEQ ID NO: 1638 - RNA, 19 nt, Homo sapiens
ccguggguggcgacucauu

SEQ ID NO: 1639 - RNA, 19 nt, Homo sapiens
augagucgccacccacggg

SEQ ID NO: 1640 - RNA, 19 nt, Homo sapiens
cccguggguggcgacucau

SEQ ID NO: 1641 - RNA, 19 nt, Homo sapiens
ugagucgccacccacgggu

SEQ ID NO: 1642 - RNA, 19 nt, Homo sapiens
acccguggguggcgacuca

SEQ ID NO: 1643 - RNA, 19 nt, Homo sapiens
gagucgccacccacgggug

SEQ ID NO: 1644 - RNA, 19 nt, Homo sapiens
cacccguggguggcgacuc

SEQ ID NO: 1645 - RNA, 19 nt, Homo sapiens
agucgccacccacgggugu

SEQ ID NO: 1646 - RNA, 19 nt, Homo sapiens
acacccguggguggcgacu

SEQ ID NO: 1647 - RNA, 19 nt, Homo sapiens
gucgccacccacgggugug

SEQ ID NO: 1648 - RNA, 19 nt, Homo sapiens
cacacccguggguggcgac

SEQ ID NO: 1649 - RNA, 19 nt, Homo sapiens
ucgccacccacgggugugu

SEQ ID NO: 1650 - RNA, 19 nt, Homo sapiens
acacacccguggguggcga

SEQ ID NO: 1651 - RNA, 19 nt, Homo sapiens
cgccacccacgggugugug

SEQ ID NO: 1652 - RNA, 19 nt, Homo sapiens
cacacacccguggguggcg

SEQ ID NO: 1653 - RNA, 19 nt, Homo sapiens
gccacccacgggugugugg

SEQ ID NO: 1654 - RNA, 19 nt, Homo sapiens
ccacacacccguggguggc

SEQ ID NO: 1655 - RNA, 19 nt, Homo sapiens
ccacccacggguguguggg

SEQ ID NO: 1656 - RNA, 19 nt, Homo sapiens
cccacacacccgugggugg

SEQ ID NO: 1657 - RNA, 19 nt, Homo sapiens
cacccacgggugugugggg

SEQ ID NO: 1658 - RNA, 19 nt, Homo sapiens
ccccacacacccgugggug

SEQ ID NO: 1659 - RNA, 19 nt, Homo sapiens
acccacggguguguggggc

SEQ ID NO: 1660 - RNA, 19 nt, Homo sapiens
gccccacacacccgugggu

SEQ ID NO: 1661 - RNA, 19 nt, Homo sapiens
cccacggguguguggggca

SEQ ID NO: 1662 - RNA, 19 nt, Homo sapiens
ugccccacacacccguggg

SEQ ID NO: 1663 - RNA, 19 nt, Homo sapiens
ccacggguguguggggcag

SEQ ID NO: 1664 - RNA, 19 nt, Homo sapiens
cugccccacacacccgugg

SEQ ID NO: 1665 - RNA, 19 nt, Homo sapiens
cacggguguguggggcagu

SEQ ID NO: 1666 - RNA, 19 nt, Homo sapiens
acugccccacacacccgug

SEQ ID NO: 1667 - RNA, 19 nt, Homo sapiens
acggguguguggggcaguu

SEQ ID NO: 1668 - RNA, 19 nt, Homo sapiens
aacugccccacacacccgu

SEQ ID NO: 1669 - RNA, 19 nt, Homo sapiens
cggguguguggggcaguua

SEQ ID NO: 1670 - RNA, 19 nt, Homo sapiens
uaacugccccacacacccg

SEQ ID NO: 1671 - RNA, 19 nt, Homo sapiens
ggguguguggggcaguuau

SEQ ID NO: 1672 - RNA, 19 nt, Homo sapiens
auaacugccccacacaccc

SEQ ID NO: 1673 - RNA, 19 nt, Homo sapiens
gguguguggggcaguuaug

SEQ ID NO: 1674 - RNA, 19 nt, Homo sapiens
cauaacugccccacacacc

SEQ ID NO: 1675 - RNA, 19 nt, Homo sapiens
guguguggggcaguuaugg

SEQ ID NO: 1676 - RNA, 19 nt, Homo sapiens
ccauaacugccccacacac

SEQ ID NO: 1677 - RNA, 19 nt, Homo sapiens
uguguggggcaguuaugga

SEQ ID NO: 1678 - RNA, 19 nt, Homo sapiens
uccauaacugccccacaca

SEQ ID NO: 1679 - RNA, 19 nt, Homo sapiens
guguggggcaguuauggac

SEQ ID NO: 1680 - RNA, 19 nt, Homo sapiens
guccauaacugccccacac

SEQ ID NO: 1681 - RNA, 19 nt, Homo sapiens
guggggcaguuauggacac

SEQ ID NO: 1682 - RNA, 19 nt, Homo sapiens
guguccauaacugccccac

SEQ ID NO: 1683 - RNA, 19 nt, Homo sapiens
uggggcaguuauggacacu

SEQ ID NO: 1684 - RNA, 19 nt, Homo sapiens
aguguccauaacugcccca

SEQ ID NO: 1685 - RNA, 19 nt, Homo sapiens
gggcaguuauggacacuuu

SEQ ID NO: 1686 - RNA, 19 nt, Homo sapiens
aaaguguccauaacugccc

SEQ ID NO: 1687 - RNA, 19 nt, Homo sapiens
ggcaguuauggacacuuug

SEQ ID NO: 1688 - RNA, 19 nt, Homo sapiens
caaaguguccauaacugcc

SEQ ID NO: 1689 - RNA, 19 nt, Homo sapiens
gcaguuauggacacuuuga

SEQ ID NO: 1690 - RNA, 19 nt, Homo sapiens
ucaaaguguccauaacugc

SEQ ID NO: 1691 - RNA, 19 nt, Homo sapiens
caguuauggacacuuugaa

SEQ ID NO: 1692 - RNA, 19 nt, Homo sapiens
uucaaaguguccauaacug

SEQ ID NO: 1693 - RNA, 19 nt, Homo sapiens
aguuauggacacuuugaaa

SEQ ID NO: 1694 - RNA, 19 nt, Homo sapiens
uuucaaaguguccauaacu

SEQ ID NO: 1695 - RNA, 19 nt, Homo sapiens
guuauggacacuuugaaac

SEQ ID NO: 1696 - RNA, 19 nt, Homo sapiens
guuucaaaguguccauaac

SEQ ID NO: 1697 - RNA, 19 nt, Homo sapiens
uuauggacacuuugaaaca

SEQ ID NO: 1698 - RNA, 19 nt, Homo sapiens
uguuucaaaguguccauaa

SEQ ID NO: 1699 - RNA, 19 nt, Homo sapiens
uauggacacuuugaaacaa

SEQ ID NO: 1700 - RNA, 19 nt, Homo sapiens
uuguuucaaaguguccaua

SEQ ID NO: 1701 - RNA, 19 nt, Homo sapiens
auggacacuuugaaacaac

SEQ ID NO: 1702 - RNA, 19 nt, Homo sapiens
guuguuucaaaguguccau

SEQ ID NO: 1703 - RNA, 19 nt, Homo sapiens
gacacuuugaaacaacaug

SEQ ID NO: 1704 - RNA, 19 nt, Homo sapiens
cauguuguuucaaaguguc

SEQ ID NO: 1705 - RNA, 19 nt, Homo sapiens
acacuuugaaacaacaugg

SEQ ID NO: 1706 - RNA, 19 nt, Homo sapiens
ccauguuguuucaaagugu

SEQ ID NO: 1707 - RNA, 19 nt, Homo sapiens
cacuuugaaacaacauggu

SEQ ID NO: 1708 - RNA, 19 nt, Homo sapiens
accauguuguuucaaagug

SEQ ID NO: 1709 - RNA, 19 nt, Homo sapiens
acuuugaaacaacauggug

SEQ ID NO: 1710 - RNA, 19 nt, Homo sapiens
caccauguuguuucaaagu

SEQ ID NO: 1711 - RNA, 19 nt, Homo sapiens
cuuugaaacaacauggugc

SEQ ID NO: 1712 - RNA, 19 nt, Homo sapiens
gcaccauguuguuucaaag

SEQ ID NO: 1713 - RNA, 19 nt, Homo sapiens
uuugaaacaacauggugcu

SEQ ID NO: 1714 - RNA, 19 nt, Homo sapiens
agcaccauguuguuucaaa

SEQ ID NO: 1715 - RNA, 19 nt, Homo sapiens
uugaaacaacauggugcug

SEQ ID NO: 1716 - RNA, 19 nt, Homo sapiens
cagcaccauguuguuucaa

SEQ ID NO: 1717 - RNA, 19 nt, Homo sapiens
ugaaacaacauggugcugg

SEQ ID NO: 1718 - RNA, 19 nt, Homo sapiens
ccagcaccauguuguuuca

SEQ ID NO: 1719 - RNA, 19 nt, Homo sapiens
gaaacaacauggugcuggg

SEQ ID NO: 1720 - RNA, 19 nt, Homo sapiens
cccagcaccauguuguuuc

SEQ ID NO: 1721 - RNA, 19 nt, Homo sapiens
aaacaacauggugcugggg

SEQ ID NO: 1722 - RNA, 19 nt, Homo sapiens
ccccagcaccauguuguuu

SEQ ID NO: 1723 - RNA, 19 nt, Homo sapiens
aacaacauggugcuggggc

SEQ ID NO: 1724 - RNA, 19 nt, Homo sapiens
gccccagcaccauguuguu

SEQ ID NO: 1725 - RNA, 19 nt, Homo sapiens
acaacauggugcuggggca

SEQ ID NO: 1726 - RNA, 19 nt, Homo sapiens
ugccccagcaccauguugu

SEQ ID NO: 1727 - RNA, 19 nt, Homo sapiens
caacauggugcuggggcag

SEQ ID NO: 1728 - RNA, 19 nt, Homo sapiens
cugccccagcaccauguug

SEQ ID NO: 1729 - RNA, 19 nt, Homo sapiens
aacauggugcuggggcagg

SEQ ID NO: 1730 - RNA, 19 nt, Homo sapiens
ccugccccagcaccauguu

SEQ ID NO: 1731 - RNA, 19 nt, Homo sapiens
acauggugcuggggcaggu

SEQ ID NO: 1732 - RNA, 19 nt, Homo sapiens
accugccccagcaccaugu

SEQ ID NO: 1733 - RNA, 19 nt, Homo sapiens
cauggugcuggggcaggug

SEQ ID NO: 1734 - RNA, 19 nt, Homo sapiens
caccugccccagcaccaug

SEQ ID NO: 1735 - RNA, 19 nt, Homo sapiens
auggugcuggggcaggugg

SEQ ID NO: 1736 - RNA, 19 nt, Homo sapiens
ccaccugccccagcaccau

SEQ ID NO: 1737 - RNA, 19 nt, Homo sapiens
uggugcuggggcagguggu

SEQ ID NO: 1738 - RNA, 19 nt, Homo sapiens
accaccugccccagcacca

SEQ ID NO: 1739 - RNA, 19 nt, Homo sapiens
ggugcuggggcagguggua

SEQ ID NO: 1740 - RNA, 19 nt, Homo sapiens
uaccaccugccccagcacc

SEQ ID NO: 1741 - RNA, 19 nt, Homo sapiens
gugcuggggcaggugguac

SEQ ID NO: 1742 - RNA, 19 nt, Homo sapiens
guaccaccugccccagcac

SEQ ID NO: 1743 - RNA, 19 nt, Homo sapiens
ugcuggggcaggugguacu

SEQ ID NO: 1744 - RNA, 19 nt, Homo sapiens
aguaccaccugccccagca

SEQ ID NO: 1745 - RNA, 19 nt, Homo sapiens
gcuggggcaggugguacua

SEQ ID NO: 1746 - RNA, 19 nt, Homo sapiens
uaguaccaccugccccagc

SEQ ID NO: 1747 - RNA, 19 nt, Homo sapiens
cuggggcaggugguacuag

SEQ ID NO: 1748 - RNA, 19 nt, Homo sapiens
cuaguaccaccugccccag

SEQ ID NO: 1749 - RNA, 19 nt, Homo sapiens
uggggcaggugguacuaga

SEQ ID NO: 1750 - RNA, 19 nt, Homo sapiens
ucuaguaccaccugcccca

SEQ ID NO: 1751 - RNA, 19 nt, Homo sapiens
gcaggugguacuagaaaua

SEQ ID NO: 1752 - RNA, 19 nt, Homo sapiens
uauuucuaguaccaccugc

SEQ ID NO: 1753 - RNA, 19 nt, Homo sapiens
caggugguacuagaaauau

SEQ ID NO: 1754 - RNA, 19 nt, Homo sapiens
auauuucuaguaccaccug

SEQ ID NO: 1755 - RNA, 19 nt, Homo sapiens
aggugguacuagaaauauu

SEQ ID NO: 1756 - RNA, 19 nt, Homo sapiens
aauauuucuaguaccaccu

SEQ ID NO: 1757 - RNA, 19 nt, Homo sapiens
ggugguacuagaaauauuu

SEQ ID NO: 1758 - RNA, 19 nt, Homo sapiens
aaauauuucuaguaccacc

SEQ ID NO: 1759 - RNA, 19 nt, Homo sapiens
gugguacuagaaauauuuc

SEQ ID NO: 1760 - RNA, 19 nt, Homo sapiens
gaaauauuucuaguaccac

SEQ ID NO: 1761 - RNA, 19 nt, Homo sapiens
ugguacuagaaauauuucu

SEQ ID NO: 1762 - RNA, 19 nt, Homo sapiens
agaaauauuucuaguacca

SEQ ID NO: 1763 - RNA, 19 nt, Homo sapiens
gguacuagaaauauuucug

SEQ ID NO: 1764 - RNA, 19 nt, Homo sapiens
cagaaauauuucuaguacc

SEQ ID NO: 1765 - RNA, 19 nt, Homo sapiens
guacuagaaauauuucugg

SEQ ID NO: 1766 - RNA, 19 nt, Homo sapiens
ccagaaauauuucuaguac

SEQ ID NO: 1767 - RNA, 19 nt, Homo sapiens
uacuagaaauauuucugga

SEQ ID NO: 1768 - RNA, 19 nt, Homo sapiens
uccagaaauauuucuagua

SEQ ID NO: 1769 - RNA, 19 nt, Homo sapiens
acuagaaauauuucuggaa

SEQ ID NO: 1770 - RNA, 19 nt, Homo sapiens
uuccagaaauauuucuagu

SEQ ID NO: 1771 - RNA, 19 nt, Homo sapiens
cuagaaauauuucuggaac

SEQ ID NO: 1772 - RNA, 19 nt, Homo sapiens
guuccagaaauauuucuag

SEQ ID NO: 1773 - RNA, 19 nt, Homo sapiens
uagaaauauuucuggaacu

SEQ ID NO: 1774 - RNA, 19 nt, Homo sapiens
aguuccagaaauauuucua

SEQ ID NO: 1775 - RNA, 19 nt, Homo sapiens
agaaauauuucuggaacua

SEQ ID NO: 1776 - RNA, 19 nt, Homo sapiens
uaguuccagaaauauuucu

SEQ ID NO: 1777 - RNA, 19 nt, Homo sapiens
gaaauauuucuggaacuag

SEQ ID NO: 1778 - RNA, 19 nt, Homo sapiens
cuaguuccagaaauauuuc

SEQ ID NO: 1779 - RNA, 19 nt, Homo sapiens
aaauauuucuggaacuagu

SEQ ID NO: 1780 - RNA, 19 nt, Homo sapiens
acuaguuccagaaauauuu

SEQ ID NO: 1781 - RNA, 19 nt, Homo sapiens
aauauuucuggaacuagua

SEQ ID NO: 1782 - RNA, 19 nt, Homo sapiens
uacuaguuccagaaauauu

SEQ ID NO: 1783 - RNA, 19 nt, Homo sapiens
uauuucuggaacuaguaaa

SEQ ID NO: 1784 - RNA, 19 nt, Homo sapiens
uuuacuaguuccagaaaua

SEQ ID NO: 1785 - RNA, 19 nt, Homo sapiens
uucuggaacuaguaaauuc

SEQ ID NO: 1786 - RNA, 19 nt, Homo sapiens
gaauuuacuaguuccagaa

SEQ ID NO: 1787 - RNA, 19 nt, Homo sapiens
ucuggaacuaguaaauucc

SEQ ID NO: 1788 - RNA, 19 nt, Homo sapiens
ggaauuuacuaguuccaga

SEQ ID NO: 1789 - RNA, 19 nt, Homo sapiens
uggaacuaguaaauuccau

SEQ ID NO: 1790 - RNA, 19 nt, Homo sapiens
auggaauuuacuaguucca

SEQ ID NO: 1791 - RNA, 19 nt, Homo sapiens
ggaacuaguaaauuccaug

SEQ ID NO: 1792 - RNA, 19 nt, Homo sapiens
cauggaauuuacuaguucc

SEQ ID NO: 1793 - RNA, 19 nt, Homo sapiens
aacuaguaaauuccaugug

SEQ ID NO: 1794 - RNA, 19 nt, Homo sapiens
cacauggaauuuacuaguu

SEQ ID NO: 1795 - RNA, 19 nt, Homo sapiens
acuaguaaauuccaugugg

SEQ ID NO: 1796 - RNA, 19 nt, Homo sapiens
ccacauggaauuuacuagu

SEQ ID NO: 1797 - RNA, 19 nt, Homo sapiens
cuaguaaauuccaugugga

SEQ ID NO: 1798 - RNA, 19 nt, Homo sapiens
uccacauggaauuuacuag

SEQ ID NO: 1799 - RNA, 19 nt, Homo sapiens
uaguaaauuccauguggac

SEQ ID NO: 1800 - RNA, 19 nt, Homo sapiens
guccacauggaauuuacua

SEQ ID NO: 1801 - RNA, 19 nt, Homo sapiens
aguaaauuccauguggacu

SEQ ID NO: 1802 - RNA, 19 nt, Homo sapiens
aguccacauggaauuuacu

SEQ ID NO: 1803 - RNA, 19 nt, Homo sapiens
guaaauuccauguggacuu

SEQ ID NO: 1804 - RNA, 19 nt, Homo sapiens
aaguccacauggaauuuac

SEQ ID NO: 1805 - RNA, 19 nt, Homo sapiens
uaaauuccauguggacuua

SEQ ID NO: 1806 - RNA, 19 nt, Homo sapiens
uaaguccacauggaauuua

SEQ ID NO: 1807 - RNA, 19 nt, Homo sapiens
aaauuccauguggacuuag

SEQ ID NO: 1808 - RNA, 19 nt, Homo sapiens
cuaaguccacauggaauuu

SEQ ID NO: 1809 - RNA, 19 nt, Homo sapiens
aauuccauguggacuuaga

SEQ ID NO: 1810 - RNA, 19 nt, Homo sapiens
ucuaaguccacauggaauu

SEQ ID NO: 1811 - RNA, 19 nt, Homo sapiens
auuccauguggacuuagag

SEQ ID NO: 1812 - RNA, 19 nt, Homo sapiens
cucuaaguccacauggaau

SEQ ID NO: 1813 - RNA, 19 nt, Homo sapiens
uuccauguggacuuagagc

SEQ ID NO: 1814 - RNA, 19 nt, Homo sapiens
gcucuaaguccacauggaa

SEQ ID NO: 1815 - RNA, 19 nt, Homo sapiens
ggagcuggcagaccuccau

SEQ ID NO: 1816 - RNA, 19 nt, Homo sapiens
auggaggucugccagcucc

SEQ ID NO: 1817 - RNA, 19 nt, Homo sapiens
gagcuggcagaccuccaug

SEQ ID NO: 1818 - RNA, 19 nt, Homo sapiens
cauggaggucugccagcuc

SEQ ID NO: 1819 - RNA, 19 nt, Homo sapiens
agcuggcagaccuccaugg

SEQ ID NO: 1820 - RNA, 19 nt, Homo sapiens
ccauggaggucugccagcu

SEQ ID NO: 1821 - RNA, 19 nt, Homo sapiens
gcuggcagaccuccauggg

SEQ ID NO: 1822 - RNA, 19 nt, Homo sapiens
cccauggaggucugccagc

SEQ ID NO: 1823 - RNA, 19 nt, Homo sapiens
cuggcagaccuccauggga

SEQ ID NO: 1824 - RNA, 19 nt, Homo sapiens
ucccauggaggucugccag

SEQ ID NO: 1825 - RNA, 19 nt, Homo sapiens
uggcagaccuccaugggaa

SEQ ID NO: 1826 - RNA, 19 nt, Homo sapiens
uucccauggaggucugcca

SEQ ID NO: 1827 - RNA, 19 nt, Homo sapiens
ggcagaccuccaugggaaa

SEQ ID NO: 1828 - RNA, 19 nt, Homo sapiens
uuucccauggaggucugcc

SEQ ID NO: 1829 - RNA, 19 nt, Homo sapiens
gcagaccuccaugggaaag

SEQ ID NO: 1830 - RNA, 19 nt, Homo sapiens
cuuucccauggaggucugc

SEQ ID NO: 1831 - RNA, 19 nt, Homo sapiens
cagaccuccaugggaaaga

SEQ ID NO: 1832 - RNA, 19 nt, Homo sapiens
ucuuucccauggaggucug

SEQ ID NO: 1833 - RNA, 19 nt, Homo sapiens
agaccuccaugggaaagau

SEQ ID NO: 1834 - RNA, 19 nt, Homo sapiens
aucuuucccauggaggucu

SEQ ID NO: 1835 - RNA, 19 nt, Homo sapiens
gaccuccaugggaaagaug

SEQ ID NO: 1836 - RNA, 19 nt, Homo sapiens
caucuuucccauggagguc

SEQ ID NO: 1837 - RNA, 19 nt, Homo sapiens
accuccaugggaaagaugc

SEQ ID NO: 1838 - RNA, 19 nt, Homo sapiens
gcaucuuucccauggaggu

SEQ ID NO: 1839 - RNA, 19 nt, Homo sapiens
cacucuuguuuuccucgug

SEQ ID NO: 1840 - RNA, 19 nt, Homo sapiens
cacgaggaaaacaagagug

SEQ ID NO: 1841 - RNA, 19 nt, Homo sapiens
acucuuguuuuccucgugc

SEQ ID NO: 1842 - RNA, 19 nt, Homo sapiens
gcacgaggaaaacaagagu

SEQ ID NO: 1843 - RNA, 19 nt, Homo sapiens
cucuuguuuuccucgugcu

SEQ ID NO: 1844 - RNA, 19 nt, Homo sapiens
agcacgaggaaaacaagag

SEQ ID NO: 1845 - RNA, 19 nt, Homo sapiens
ucuuguuuuccucgugcuu

SEQ ID NO: 1846 - RNA, 19 nt, Homo sapiens
aagcacgaggaaaacaaga

SEQ ID NO: 1847 - RNA, 19 nt, Homo sapiens
uuguuuuccucgugcuuug

SEQ ID NO: 1848 - RNA, 19 nt, Homo sapiens
caaagcacgaggaaaacaa

SEQ ID NO: 1849 - RNA, 19 nt, Homo sapiens
uguuuuccucgugcuuugu

SEQ ID NO: 1850 - RNA, 19 nt, Homo sapiens
acaaagcacgaggaaaaca

SEQ ID NO: 1851 - RNA, 19 nt, Homo sapiens
guuuuccucgugcuuugug

SEQ ID NO: 1852 - RNA, 19 nt, Homo sapiens
cacaaagcacgaggaaaac

SEQ ID NO: 1853 - RNA, 19 nt, Homo sapiens
uuuuccucgugcuuugugg

SEQ ID NO: 1854 - RNA, 19 nt, Homo sapiens
ccacaaagcacgaggaaaa

SEQ ID NO: 1855 - RNA, 19 nt, Homo sapiens
uuuccucgugcuuuguggc

SEQ ID NO: 1856 - RNA, 19 nt, Homo sapiens
gccacaaagcacgaggaaa

SEQ ID NO: 1857 - RNA, 19 nt, Homo sapiens
uuccucgugcuuuguggcc

SEQ ID NO: 1858 - RNA, 19 nt, Homo sapiens
ggccacaaagcacgaggaa

SEQ ID NO: 1859 - RNA, 19 nt, Homo sapiens
uccucgugcuuuguggcca

SEQ ID NO: 1860 - RNA, 19 nt, Homo sapiens
uggccacaaagcacgagga

SEQ ID NO: 1861 - RNA, 19 nt, Homo sapiens
ccucgugcuuuguggccaa

SEQ ID NO: 1862 - RNA, 19 nt, Homo sapiens
uuggccacaaagcacgagg

SEQ ID NO: 1863 - RNA, 19 nt, Homo sapiens
cucgugcuuuguggccaau

SEQ ID NO: 1864 - RNA, 19 nt, Homo sapiens
auuggccacaaagcacgag

SEQ ID NO: 1865 - RNA, 19 nt, Homo sapiens
ucgugcuuuguggccaaug

SEQ ID NO: 1866 - RNA, 19 nt, Homo sapiens
cauuggccacaaagcacga

SEQ ID NO: 1867 - RNA, 19 nt, Homo sapiens
cgugcuuuguggccaauga

SEQ ID NO: 1868 - RNA, 19 nt, Homo sapiens
ucauuggccacaaagcacg

SEQ ID NO: 1869 - RNA, 19 nt, Homo sapiens
gugcuuuguggccaaugac

SEQ ID NO: 1870 - RNA, 19 nt, Homo sapiens
gucauuggccacaaagcac

SEQ ID NO: 1871 - RNA, 19 nt, Homo sapiens
ugcuuuguggccaaugacu

SEQ ID NO: 1872 - RNA, 19 nt, Homo sapiens
agucauuggccacaaagca

SEQ ID NO: 1873 - RNA, 19 nt, Homo sapiens
gcuuuguggccaaugacuc

SEQ ID NO: 1874 - RNA, 19 nt, Homo sapiens
gagucauuggccacaaagc

SEQ ID NO: 1875 - RNA, 19 nt, Homo sapiens
cuuuguggccaaugacuca

SEQ ID NO: 1876 - RNA, 19 nt, Homo sapiens
ugagucauuggccacaaag

SEQ ID NO: 1877 - RNA, 19 nt, Homo sapiens
uuuguggccaaugacucaa

SEQ ID NO: 1878 - RNA, 19 nt, Homo sapiens
uugagucauuggccacaaa

SEQ ID NO: 1879 - RNA, 19 nt, Homo sapiens
uuguggccaaugacucaac

SEQ ID NO: 1880 - RNA, 19 nt, Homo sapiens
guugagucauuggccacaa

SEQ ID NO: 1881 - RNA, 19 nt, Homo sapiens
uguggccaaugacucaacc

SEQ ID NO: 1882 - RNA, 19 nt, Homo sapiens
gguugagucauuggccaca

SEQ ID NO: 1883 - RNA, 19 nt, Homo sapiens
guggccaaugacucaaccc

SEQ ID NO: 1884 - RNA, 19 nt, Homo sapiens
ggguugagucauuggccac

SEQ ID NO: 1885 - RNA, 19 nt, Homo sapiens
uggccaaugacucaacccu

SEQ ID NO: 1886 - RNA, 19 nt, Homo sapiens
aggguugagucauuggcca

SEQ ID NO: 1887 - RNA, 19 nt, Homo sapiens
ggccaaugacucaacccuc

SEQ ID NO: 1888 - RNA, 19 nt, Homo sapiens
gaggguugagucauuggcc

SEQ ID NO: 1889 - RNA, 19 nt, Homo sapiens
gccaaugacucaacccucu

SEQ ID NO: 1890 - RNA, 19 nt, Homo sapiens
agaggguugagucauuggc

SEQ ID NO: 1891 - RNA, 19 nt, Homo sapiens
ccaaugacucaacccucuu

SEQ ID NO: 1892 - RNA, 19 nt, Homo sapiens
aagaggguugagucauugg

SEQ ID NO: 1893 - RNA, 19 nt, Homo sapiens
caaugacucaacccucuuc

SEQ ID NO: 1894 - RNA, 19 nt, Homo sapiens
gaagaggguugagucauug

SEQ ID NO: 1895 - RNA, 19 nt, Homo sapiens
aaugacucaacccucuuca

SEQ ID NO: 1896 - RNA, 19 nt, Homo sapiens
ugaagaggguugagucauu

SEQ ID NO: 1897 - RNA, 19 nt, Homo sapiens
augacucaacccucuucac

SEQ ID NO: 1898 - RNA, 19 nt, Homo sapiens
gugaagaggguugagucau

SEQ ID NO: 1899 - RNA, 19 nt, Homo sapiens
ugacucaacccucuucacc

SEQ ID NO: 1900 - RNA, 19 nt, Homo sapiens
ggugaagaggguugaguca

SEQ ID NO: 1901 - RNA, 19 nt, Homo sapiens
gacucaacccucuucaccc

SEQ ID NO: 1902 - RNA, 19 nt, Homo sapiens
gggugaagaggguugaguc

SEQ ID NO: 1903 - RNA, 19 nt, Homo sapiens
acucaacccucuucacccu

SEQ ID NO: 1904 - RNA, 19 nt, Homo sapiens
agggugaagaggguugagu

SEQ ID NO: 1905 - RNA, 19 nt, Homo sapiens
cucaacccucuucacccug

SEQ ID NO: 1906 - RNA, 19 nt, Homo sapiens
cagggugaagaggguugag

SEQ ID NO: 1907 - RNA, 19 nt, Homo sapiens
ucaacccucuucacccugg

SEQ ID NO: 1908 - RNA, 19 nt, Homo sapiens
ccagggugaagaggguuga

SEQ ID NO: 1909 - RNA, 19 nt, Homo sapiens
caacccucuucacccuggc

SEQ ID NO: 1910 - RNA, 19 nt, Homo sapiens
gccagggugaagaggguug

SEQ ID NO: 1911 - RNA, 19 nt, Homo sapiens
aacccucuucacccuggcu

SEQ ID NO: 1912 - RNA, 19 nt, Homo sapiens
agccagggugaagaggguu

SEQ ID NO: 1913 - RNA, 19 nt, Homo sapiens
acccucuucacccuggcua

SEQ ID NO: 1914 - RNA, 19 nt, Homo sapiens
uagccagggugaagagggu

SEQ ID NO: 1915 - RNA, 19 nt, Homo sapiens
cccucuucacccuggcuaa

SEQ ID NO: 1916 - RNA, 19 nt, Homo sapiens
uuagccagggugaagaggg

SEQ ID NO: 1917 - RNA, 19 nt, Homo sapiens
ccucuucacccuggcuaag

SEQ ID NO: 1918 - RNA, 19 nt, Homo sapiens
cuuagccagggugaagagg

SEQ ID NO: 1919 - RNA, 19 nt, Homo sapiens
cuucacccuggcuaagaug

SEQ ID NO: 1920 - RNA, 19 nt, Homo sapiens
caucuuagccagggugaag

SEQ ID NO: 1921 - RNA, 19 nt, Homo sapiens
uucacccuggcuaagauga

SEQ ID NO: 1922 - RNA, 19 nt, Homo sapiens
ucaucuuagccagggugaa

SEQ ID NO: 1923 - RNA, 19 nt, Homo sapiens
cacccuggcuaagaugaug

SEQ ID NO: 1924 - RNA, 19 nt, Homo sapiens
caucaucuuagccagggug

SEQ ID NO: 1925 - RNA, 19 nt, Homo sapiens
acccuggcuaagaugaugc

SEQ ID NO: 1926 - RNA, 19 nt, Homo sapiens
gcaucaucuuagccagggu

SEQ ID NO: 1927 - RNA, 19 nt, Homo sapiens
cccuggcuaagaugaugcc

SEQ ID NO: 1928 - RNA, 19 nt, Homo sapiens
ggcaucaucuuagccaggg

SEQ ID NO: 1929 - RNA, 19 nt, Homo sapiens
ccuggcuaagaugaugcca

SEQ ID NO: 1930 - RNA, 19 nt, Homo sapiens
uggcaucaucuuagccagg

SEQ ID NO: 1931 - RNA, 19 nt, Homo sapiens
cuggcuaagaugaugccag

SEQ ID NO: 1932 - RNA, 19 nt, Homo sapiens
cuggcaucaucuuagccag

SEQ ID NO: 1933 - RNA, 19 nt, Homo sapiens
uggcuaagaugaugccagg

SEQ ID NO: 1934 - RNA, 19 nt, Homo sapiens
ccuggcaucaucuuagcca

SEQ ID NO: 1935 - RNA, 19 nt, Homo sapiens
ggcuaagaugaugccaggc

SEQ ID NO: 1936 - RNA, 19 nt, Homo sapiens
gccuggcaucaucuuagcc

SEQ ID NO: 1937 - RNA, 19 nt, Homo sapiens
gcuaagaugaugccaggcu

SEQ ID NO: 1938 - RNA, 19 nt, Homo sapiens
agccuggcaucaucuuagc

SEQ ID NO: 1939 - RNA, 19 nt, Homo sapiens
cuaagaugaugccaggcug

SEQ ID NO: 1940 - RNA, 19 nt, Homo sapiens
cagccuggcaucaucuuag

SEQ ID NO: 1941 - RNA, 19 nt, Homo sapiens
uaagaugaugccaggcugu

SEQ ID NO: 1942 - RNA, 19 nt, Homo sapiens
acagccuggcaucaucuua

SEQ ID NO: 1943 - RNA, 19 nt, Homo sapiens
aagaugaugccaggcugug

SEQ ID NO: 1944 - RNA, 19 nt, Homo sapiens
cacagccuggcaucaucuu

SEQ ID NO: 1945 - RNA, 19 nt, Homo sapiens
agaugaugccaggcuguga

SEQ ID NO: 1946 - RNA, 19 nt, Homo sapiens
ucacagccuggcaucaucu

SEQ ID NO: 1947 - RNA, 19 nt, Homo sapiens
gaugaugccaggcugugag

SEQ ID NO: 1948 - RNA, 19 nt, Homo sapiens
cucacagccuggcaucauc

SEQ ID NO: 1949 - RNA, 19 nt, Homo sapiens
augaugccaggcugugaga

SEQ ID NO: 1950 - RNA, 19 nt, Homo sapiens
ucucacagccuggcaucau

SEQ ID NO: 1951 - RNA, 19 nt, Homo sapiens
ugaugccaggcugugagau

SEQ ID NO: 1952 - RNA, 19 nt, Homo sapiens
aucucacagccuggcauca

SEQ ID NO: 1953 - RNA, 19 nt, Homo sapiens
augccaggcugugagauuu

SEQ ID NO: 1954 - RNA, 19 nt, Homo sapiens
aaaucucacagccuggcau

SEQ ID NO: 1955 - RNA, 19 nt, Homo sapiens
ugccaggcugugagauuua

SEQ ID NO: 1956 - RNA, 19 nt, Homo sapiens
uaaaucucacagccuggca

SEQ ID NO: 1957 - RNA, 19 nt, Homo sapiens
gccaggcugugagauuuac

SEQ ID NO: 1958 - RNA, 19 nt, Homo sapiens
guaaaucucacagccuggc

SEQ ID NO: 1959 - RNA, 19 nt, Homo sapiens
ccaggcugugagauuuacu

SEQ ID NO: 1960 - RNA, 19 nt, Homo sapiens
aguaaaucucacagccugg

SEQ ID NO: 1961 - RNA, 19 nt, Homo sapiens
caggcugugagauuuacuc

SEQ ID NO: 1962 - RNA, 19 nt, Homo sapiens
gaguaaaucucacagccug

SEQ ID NO: 1963 - RNA, 19 nt, Homo sapiens
aggcugugagauuuacucu

SEQ ID NO: 1964 - RNA, 19 nt, Homo sapiens
agaguaaaucucacagccu

SEQ ID NO: 1965 - RNA, 19 nt, Homo sapiens
ggcugugagauuuacucug

SEQ ID NO: 1966 - RNA, 19 nt, Homo sapiens
cagaguaaaucucacagcc

SEQ ID NO: 1967 - RNA, 19 nt, Homo sapiens
gcugugagauuuacucuga

SEQ ID NO: 1968 - RNA, 19 nt, Homo sapiens
ucagaguaaaucucacagc

SEQ ID NO: 1969 - RNA, 19 nt, Homo sapiens
gugagauuuacucugauuc

SEQ ID NO: 1970 - RNA, 19 nt, Homo sapiens
gaaucagaguaaaucucac

SEQ ID NO: 1971 - RNA, 19 nt, Homo sapiens
ugagauuuacucugauucu

SEQ ID NO: 1972 - RNA, 19 nt, Homo sapiens
agaaucagaguaaaucuca

SEQ ID NO: 1973 - RNA, 19 nt, Homo sapiens
gagauuuacucugauucug

SEQ ID NO: 1974 - RNA, 19 nt, Homo sapiens
cagaaucagaguaaaucuc

SEQ ID NO: 1975 - RNA, 19 nt, Homo sapiens
agauuuacucugauucugg

SEQ ID NO: 1976 - RNA, 19 nt, Homo sapiens
ccagaaucagaguaaaucu

SEQ ID NO: 1977 - RNA, 19 nt, Homo sapiens
gauuuacucugauucuggg

SEQ ID NO: 1978 - RNA, 19 nt, Homo sapiens
cccagaaucagaguaaauc

SEQ ID NO: 1979 - RNA, 19 nt, Homo sapiens
auuuacucugauucuggga

SEQ ID NO: 1980 - RNA, 19 nt, Homo sapiens
ucccagaaucagaguaaau

SEQ ID NO: 1981 - RNA, 19 nt, Homo sapiens
uuuacucugauucugggaa

SEQ ID NO: 1982 - RNA, 19 nt, Homo sapiens
uucccagaaucagaguaaa

SEQ ID NO: 1983 - RNA, 19 nt, Homo sapiens
uuacucugauucugggaac

SEQ ID NO: 1984 - RNA, 19 nt, Homo sapiens
guucccagaaucagaguaa

SEQ ID NO: 1985 - RNA, 19 nt, Homo sapiens
uacucugauucugggaacc

SEQ ID NO: 1986 - RNA, 19 nt, Homo sapiens
gguucccagaaucagagua

SEQ ID NO: 1987 - RNA, 19 nt, Homo sapiens
acucugauucugggaacca

SEQ ID NO: 1988 - RNA, 19 nt, Homo sapiens
ugguucccagaaucagagu

SEQ ID NO: 1989 - RNA, 19 nt, Homo sapiens
cucugauucugggaaccau

SEQ ID NO: 1990 - RNA, 19 nt, Homo sapiens
augguucccagaaucagag

SEQ ID NO: 1991 - RNA, 19 nt, Homo sapiens
ucugauucugggaaccaug

SEQ ID NO: 1992 - RNA, 19 nt, Homo sapiens
caugguucccagaaucaga

SEQ ID NO: 1993 - RNA, 19 nt, Homo sapiens
cugauucugggaaccaugc

SEQ ID NO: 1994 - RNA, 19 nt, Homo sapiens
gcaugguucccagaaucag

SEQ ID NO: 1995 - RNA, 19 nt, Homo sapiens
ugauucugggaaccaugcc

SEQ ID NO: 1996 - RNA, 19 nt, Homo sapiens
ggcaugguucccagaauca

SEQ ID NO: 1997 - RNA, 19 nt, Homo sapiens
gauucugggaaccaugccu

SEQ ID NO: 1998 - RNA, 19 nt, Homo sapiens
aggcaugguucccagaauc

SEQ ID NO: 1999 - RNA, 19 nt, Homo sapiens
auucugggaaccaugccuc

SEQ ID NO: 2000 - RNA, 19 nt, Homo sapiens
gaggcaugguucccagaau

SEQ ID NO: 2001 - RNA, 19 nt, Homo sapiens
uucugggaaccaugccucc

SEQ ID NO: 2002 - RNA, 19 nt, Homo sapiens
ggaggcaugguucccagaa

SEQ ID NO: 2003 - RNA, 19 nt, Homo sapiens
ucugggaaccaugccucca

SEQ ID NO: 2004 - RNA, 19 nt, Homo sapiens
uggaggcaugguucccaga

SEQ ID NO: 2005 - RNA, 19 nt, Homo sapiens
cugggaaccaugccuccau

SEQ ID NO: 2006 - RNA, 19 nt, Homo sapiens
auggaggcaugguucccag

SEQ ID NO: 2007 - RNA, 19 nt, Homo sapiens
ugggaaccaugccuccaug

SEQ ID NO: 2008 - RNA, 19 nt, Homo sapiens
cauggaggcaugguuccca

SEQ ID NO: 2009 - RNA, 19 nt, Homo sapiens
gggaaccaugccuccauga

SEQ ID NO: 2010 - RNA, 19 nt, Homo sapiens
ucauggaggcaugguuccc

SEQ ID NO: 2011 - RNA, 19 nt, Homo sapiens
gaaccaugccuccaugauc

SEQ ID NO: 2012 - RNA, 19 nt, Homo sapiens
gaucauggaggcaugguuc

SEQ ID NO: 2013 - RNA, 19 nt, Homo sapiens
aaccaugccuccaugaucc

SEQ ID NO: 2014 - RNA, 19 nt, Homo sapiens
ggaucauggaggcaugguu

SEQ ID NO: 2015 - RNA, 19 nt, Homo sapiens
accaugccuccaugaucca

SEQ ID NO: 2016 - RNA, 19 nt, Homo sapiens
uggaucauggaggcauggu

SEQ ID NO: 2017 - RNA, 19 nt, Homo sapiens
ccaugccuccaugauccaa

SEQ ID NO: 2018 - RNA, 19 nt, Homo sapiens
uuggaucauggaggcaugg

SEQ ID NO: 2019 - RNA, 19 nt, Homo sapiens
caugccuccaugauccaag

SEQ ID NO: 2020 - RNA, 19 nt, Homo sapiens
cuuggaucauggaggcaug

SEQ ID NO: 2021 - RNA, 19 nt, Homo sapiens
augccuccaugauccaagg

SEQ ID NO: 2022 - RNA, 19 nt, Homo sapiens
ccuuggaucauggaggcau

SEQ ID NO: 2023 - RNA, 19 nt, Homo sapiens
ugccuccaugauccaaggg

SEQ ID NO: 2024 - RNA, 19 nt, Homo sapiens
cccuuggaucauggaggca

SEQ ID NO: 2025 - RNA, 19 nt, Homo sapiens
uccaugauccaagggauuc

SEQ ID NO: 2026 - RNA, 19 nt, Homo sapiens
gaaucccuuggaucaugga

SEQ ID NO: 2027 - RNA, 19 nt, Homo sapiens
ccaugauccaagggauucg

SEQ ID NO: 2028 - RNA, 19 nt, Homo sapiens
cgaaucccuuggaucaugg

SEQ ID NO: 2029 - RNA, 19 nt, Homo sapiens
caugauccaagggauucga

SEQ ID NO: 2030 - RNA, 19 nt, Homo sapiens
ucgaaucccuuggaucaug

SEQ ID NO: 2031 - RNA, 19 nt, Homo sapiens
augauccaagggauucgaa

SEQ ID NO: 2032 - RNA, 19 nt, Homo sapiens
uucgaaucccuuggaucau

SEQ ID NO: 2033 - RNA, 19 nt, Homo sapiens
ugauccaagggauucgaaa

SEQ ID NO: 2034 - RNA, 19 nt, Homo sapiens
uuucgaaucccuuggauca

SEQ ID NO: 2035 - RNA, 19 nt, Homo sapiens
gauccaagggauucgaaac

SEQ ID NO: 2036 - RNA, 19 nt, Homo sapiens
guuucgaaucccuuggauc

SEQ ID NO: 2037 - RNA, 19 nt, Homo sapiens
uccaagggauucgaaacag

SEQ ID NO: 2038 - RNA, 19 nt, Homo sapiens
cuguuucgaaucccuugga

SEQ ID NO: 2039 - RNA, 19 nt, Homo sapiens
ccaagggauucgaaacagc

SEQ ID NO: 2040 - RNA, 19 nt, Homo sapiens
gcuguuucgaaucccuugg

SEQ ID NO: 2041 - RNA, 19 nt, Homo sapiens
caagggauucgaaacagcc

SEQ ID NO: 2042 - RNA, 19 nt, Homo sapiens
ggcuguuucgaaucccuug

SEQ ID NO: 2043 - RNA, 19 nt, Homo sapiens
aagggauucgaaacagccg

SEQ ID NO: 2044 - RNA, 19 nt, Homo sapiens
cggcuguuucgaaucccuu

SEQ ID NO: 2045 - RNA, 19 nt, Homo sapiens
agggauucgaaacagccga

SEQ ID NO: 2046 - RNA, 19 nt, Homo sapiens
ucggcuguuucgaaucccu

SEQ ID NO: 2047 - RNA, 19 nt, Homo sapiens
gggauucgaaacagccgag

SEQ ID NO: 2048 - RNA, 19 nt, Homo sapiens
cucggcuguuucgaauccc

SEQ ID NO: 2049 - RNA, 19 nt, Homo sapiens
ggauucgaaacagccgagu

SEQ ID NO: 2050 - RNA, 19 nt, Homo sapiens
acucggcuguuucgaaucc

SEQ ID NO: 2051 - RNA, 19 nt, Homo sapiens
gauucgaaacagccgagug

SEQ ID NO: 2052 - RNA, 19 nt, Homo sapiens
cacucggcuguuucgaauc

SEQ ID NO: 2053 - RNA, 19 nt, Homo sapiens
auucgaaacagccgagugc

SEQ ID NO: 2054 - RNA, 19 nt, Homo sapiens
gcacucggcuguuucgaau

SEQ ID NO: 2055 - RNA, 19 nt, Homo sapiens
uucgaaacagccgagugcc

SEQ ID NO: 2056 - RNA, 19 nt, Homo sapiens
ggcacucggcuguuucgaa

SEQ ID NO: 2057 - RNA, 19 nt, Homo sapiens
ucgaaacagccgagugcca

SEQ ID NO: 2058 - RNA, 19 nt, Homo sapiens
uggcacucggcuguuucga

SEQ ID NO: 2059 - RNA, 19 nt, Homo sapiens
cgaaacagccgagugccaa

SEQ ID NO: 2060 - RNA, 19 nt, Homo sapiens
uuggcacucggcuguuucg

SEQ ID NO: 2061 - RNA, 19 nt, Homo sapiens
gaaacagccgagugccaaa

SEQ ID NO: 2062 - RNA, 19 nt, Homo sapiens
uuuggcacucggcuguuuc

SEQ ID NO: 2063 - RNA, 19 nt, Homo sapiens
aaacagccgagugccaaag

SEQ ID NO: 2064 - RNA, 19 nt, Homo sapiens
cuuuggcacucggcuguuu

SEQ ID NO: 2065 - RNA, 19 nt, Homo sapiens
aacagccgagugccaaagu

SEQ ID NO: 2066 - RNA, 19 nt, Homo sapiens
acuuuggcacucggcuguu

SEQ ID NO: 2067 - RNA, 19 nt, Homo sapiens
acagccgagugccaaagua

SEQ ID NO: 2068 - RNA, 19 nt, Homo sapiens
uacuuuggcacucggcugu

SEQ ID NO: 2069 - RNA, 19 nt, Homo sapiens
cagccgagugccaaaguac

SEQ ID NO: 2070 - RNA, 19 nt, Homo sapiens
guacuuuggcacucggcug

SEQ ID NO: 2071 - RNA, 19 nt, Homo sapiens
gccgagugccaaaguacau

SEQ ID NO: 2072 - RNA, 19 nt, Homo sapiens
auguacuuuggcacucggc

SEQ ID NO: 2073 - RNA, 19 nt, Homo sapiens
ccgagugccaaaguacauc

SEQ ID NO: 2074 - RNA, 19 nt, Homo sapiens
gauguacuuuggcacucgg

SEQ ID NO: 2075 - RNA, 19 nt, Homo sapiens
cgagugccaaaguacaucu

SEQ ID NO: 2076 - RNA, 19 nt, Homo sapiens
agauguacuuuggcacucg

SEQ ID NO: 2077 - RNA, 19 nt, Homo sapiens
gagugccaaaguacaucuu

SEQ ID NO: 2078 - RNA, 19 nt, Homo sapiens
aagauguacuuuggcacuc

SEQ ID NO: 2079 - RNA, 19 nt, Homo sapiens
agugccaaaguacaucuuc

SEQ ID NO: 2080 - RNA, 19 nt, Homo sapiens
gaagauguacuuuggcacu

SEQ ID NO: 2081 - RNA, 19 nt, Homo sapiens
gugccaaaguacaucuucc

SEQ ID NO: 2082 - RNA, 19 nt, Homo sapiens
ggaagauguacuuuggcac

SEQ ID NO: 2083 - RNA, 19 nt, Homo sapiens
ugccaaaguacaucuuccg

SEQ ID NO: 2084 - RNA, 19 nt, Homo sapiens
cggaagauguacuuuggca

SEQ ID NO: 2085 - RNA, 19 nt, Homo sapiens
gccaaaguacaucuuccgc

SEQ ID NO: 2086 - RNA, 19 nt, Homo sapiens
gcggaagauguacuuuggc

SEQ ID NO: 2087 - RNA, 19 nt, Homo sapiens
ccaaaguacaucuuccgcc

SEQ ID NO: 2088 - RNA, 19 nt, Homo sapiens
ggcggaagauguacuuugg

SEQ ID NO: 2089 - RNA, 19 nt, Homo sapiens
caaaguacaucuuccgcca

SEQ ID NO: 2090 - RNA, 19 nt, Homo sapiens
uggcggaagauguacuuug

SEQ ID NO: 2091 - RNA, 19 nt, Homo sapiens
aaaguacaucuuccgccac

SEQ ID NO: 2092 - RNA, 19 nt, Homo sapiens
guggcggaagauguacuuu

SEQ ID NO: 2093 - RNA, 19 nt, Homo sapiens
aaguacaucuuccgccaca

SEQ ID NO: 2094 - RNA, 19 nt, Homo sapiens
uguggcggaagauguacuu

SEQ ID NO: 2095 - RNA, 19 nt, Homo sapiens
aguacaucuuccgccacaa

SEQ ID NO: 2096 - RNA, 19 nt, Homo sapiens
uuguggcggaagauguacu

SEQ ID NO: 2097 - RNA, 19 nt, Homo sapiens
guacaucuuccgccacaau

SEQ ID NO: 2098 - RNA, 19 nt, Homo sapiens
auuguggcggaagauguac

SEQ ID NO: 2099 - RNA, 19 nt, Homo sapiens
uacaucuuccgccacaaug

SEQ ID NO: 2100 - RNA, 19 nt, Homo sapiens
cauuguggcggaagaugua

SEQ ID NO: 2101 - RNA, 19 nt, Homo sapiens
acaucuuccgccacaauga

SEQ ID NO: 2102 - RNA, 19 nt, Homo sapiens
ucauuguggcggaagaugu

SEQ ID NO: 2103 - RNA, 19 nt, Homo sapiens
caucuuccgccacaaugau

SEQ ID NO: 2104 - RNA, 19 nt, Homo sapiens
aucauuguggcggaagaug

SEQ ID NO: 2105 - RNA, 19 nt, Homo sapiens
aucuuccgccacaaugaug

SEQ ID NO: 2106 - RNA, 19 nt, Homo sapiens
caucauuguggcggaagau

SEQ ID NO: 2107 - RNA, 19 nt, Homo sapiens
ucuuccgccacaaugaugu

SEQ ID NO: 2108 - RNA, 19 nt, Homo sapiens
acaucauuguggcggaaga

SEQ ID NO: 2109 - RNA, 19 nt, Homo sapiens
cuuccgccacaaugauguc

SEQ ID NO: 2110 - RNA, 19 nt, Homo sapiens
gacaucauuguggcggaag

SEQ ID NO: 2111 - RNA, 19 nt, Homo sapiens
uuccgccacaaugauguca

SEQ ID NO: 2112 - RNA, 19 nt, Homo sapiens
ugacaucauuguggcggaa

SEQ ID NO: 2113 - RNA, 19 nt, Homo sapiens
uccgccacaaugaugucag

SEQ ID NO: 2114 - RNA, 19 nt, Homo sapiens
cugacaucauuguggcgga

SEQ ID NO: 2115 - RNA, 19 nt, Homo sapiens
ccgccacaaugaugucagc

SEQ ID NO: 2116 - RNA, 19 nt, Homo sapiens
gcugacaucauuguggcgg

SEQ ID NO: 2117 - RNA, 19 nt, Homo sapiens
cgccacaaugaugucagcc

SEQ ID NO: 2118 - RNA, 19 nt, Homo sapiens
ggcugacaucauuguggcg

SEQ ID NO: 2119 - RNA, 19 nt, Homo sapiens
gccacaaugaugucagcca

SEQ ID NO: 2120 - RNA, 19 nt, Homo sapiens
uggcugacaucauuguggc

SEQ ID NO: 2121 - RNA, 19 nt, Homo sapiens
cucagagaacugcugcaaa

SEQ ID NO: 2122 - RNA, 19 nt, Homo sapiens
uuugcagcaguucucugag

SEQ ID NO: 2123 - RNA, 19 nt, Homo sapiens
ucagagaacugcugcaaag

SEQ ID NO: 2124 - RNA, 19 nt, Homo sapiens
cuuugcagcaguucucuga

SEQ ID NO: 2125 - RNA, 19 nt, Homo sapiens
cagagaacugcugcaaaga

SEQ ID NO: 2126 - RNA, 19 nt, Homo sapiens
ucuuugcagcaguucucug

SEQ ID NO: 2127 - RNA, 19 nt, Homo sapiens
agagaacugcugcaaagau

SEQ ID NO: 2128 - RNA, 19 nt, Homo sapiens
aucuuugcagcaguucucu

SEQ ID NO: 2129 - RNA, 19 nt, Homo sapiens
gagaacugcugcaaagauc

SEQ ID NO: 2130 - RNA, 19 nt, Homo sapiens
gaucuuugcagcaguucuc

SEQ ID NO: 2131 - RNA, 19 nt, Homo sapiens
agaacugcugcaaagaucu

SEQ ID NO: 2132 - RNA, 19 nt, Homo sapiens
agaucuuugcagcaguucu

SEQ ID NO: 2133 - RNA, 19 nt, Homo sapiens
gaacugcugcaaagaucug

SEQ ID NO: 2134 - RNA, 19 nt, Homo sapiens
cagaucuuugcagcaguuc

SEQ ID NO: 2135 - RNA, 19 nt, Homo sapiens
aacugcugcaaagaucuga

SEQ ID NO: 2136 - RNA, 19 nt, Homo sapiens
ucagaucuuugcagcaguu

SEQ ID NO: 2137 - RNA, 19 nt, Homo sapiens
acugcugcaaagaucugac

SEQ ID NO: 2138 - RNA, 19 nt, Homo sapiens
gucagaucuuugcagcagu

SEQ ID NO: 2139 - RNA, 19 nt, Homo sapiens
cugcugcaaagaucugacc

SEQ ID NO: 2140 - RNA, 19 nt, Homo sapiens
ggucagaucuuugcagcag

SEQ ID NO: 2141 - RNA, 19 nt, Homo sapiens
ugcugcaaagaucugaccc

SEQ ID NO: 2142 - RNA, 19 nt, Homo sapiens
gggucagaucuuugcagca

SEQ ID NO: 2143 - RNA, 19 nt, Homo sapiens
ucaguccccaagauugugg

SEQ ID NO: 2144 - RNA, 19 nt, Homo sapiens
ccacaaucuuggggacuga

SEQ ID NO: 2145 - RNA, 19 nt, Homo sapiens
caguccccaagauuguggc

SEQ ID NO: 2146 - RNA, 19 nt, Homo sapiens
gccacaaucuuggggacug

SEQ ID NO: 2147 - RNA, 19 nt, Homo sapiens
aguccccaagauuguggca

SEQ ID NO: 2148 - RNA, 19 nt, Homo sapiens
ugccacaaucuuggggacu

SEQ ID NO: 2149 - RNA, 19 nt, Homo sapiens
uccccaagauuguggcauu

SEQ ID NO: 2150 - RNA, 19 nt, Homo sapiens
aaugccacaaucuugggga

SEQ ID NO: 2151 - RNA, 19 nt, Homo sapiens
ccccaagauuguggcauuu

SEQ ID NO: 2152 - RNA, 19 nt, Homo sapiens
aaaugccacaaucuugggg

SEQ ID NO: 2153 - RNA, 19 nt, Homo sapiens
cccaagauuguggcauuug

SEQ ID NO: 2154 - RNA, 19 nt, Homo sapiens
caaaugccacaaucuuggg

SEQ ID NO: 2155 - RNA, 19 nt, Homo sapiens
ccaagauuguggcauuuga

SEQ ID NO: 2156 - RNA, 19 nt, Homo sapiens
ucaaaugccacaaucuugg

SEQ ID NO: 2157 - RNA, 19 nt, Homo sapiens
caagauuguggcauuugaa

SEQ ID NO: 2158 - RNA, 19 nt, Homo sapiens
uucaaaugccacaaucuug

SEQ ID NO: 2159 - RNA, 19 nt, Homo sapiens
aagauuguggcauuugaaa

SEQ ID NO: 2160 - RNA, 19 nt, Homo sapiens
uuucaaaugccacaaucuu

SEQ ID NO: 2161 - RNA, 19 nt, Homo sapiens
agauuguggcauuugaaac

SEQ ID NO: 2162 - RNA, 19 nt, Homo sapiens
guuucaaaugccacaaucu

SEQ ID NO: 2163 - RNA, 19 nt, Homo sapiens
gauuguggcauuugaaacu

SEQ ID NO: 2164 - RNA, 19 nt, Homo sapiens
aguuucaaaugccacaauc

SEQ ID NO: 2165 - RNA, 19 nt, Homo sapiens
auuguggcauuugaaacug

SEQ ID NO: 2166 - RNA, 19 nt, Homo sapiens
caguuucaaaugccacaau

SEQ ID NO: 2167 - RNA, 19 nt, Homo sapiens
uuguggcauuugaaacugu

SEQ ID NO: 2168 - RNA, 19 nt, Homo sapiens
acaguuucaaaugccacaa

SEQ ID NO: 2169 - RNA, 19 nt, Homo sapiens
uguggcauuugaaacuguc

SEQ ID NO: 2170 - RNA, 19 nt, Homo sapiens
gacaguuucaaaugccaca

SEQ ID NO: 2171 - RNA, 19 nt, Homo sapiens
guggcauuugaaacugucc

SEQ ID NO: 2172 - RNA, 19 nt, Homo sapiens
ggacaguuucaaaugccac

SEQ ID NO: 2173 - RNA, 19 nt, Homo sapiens
uggcauuugaaacugucca

SEQ ID NO: 2174 - RNA, 19 nt, Homo sapiens
uggacaguuucaaaugcca

SEQ ID NO: 2175 - RNA, 19 nt, Homo sapiens
ggcauuugaaacuguccau

SEQ ID NO: 2176 - RNA, 19 nt, Homo sapiens
auggacaguuucaaaugcc

SEQ ID NO: 2177 - RNA, 19 nt, Homo sapiens
gcauuugaaacuguccauu

SEQ ID NO: 2178 - RNA, 19 nt, Homo sapiens
aauggacaguuucaaaugc

SEQ ID NO: 2179 - RNA, 19 nt, Homo sapiens
cauuugaaacuguccauuc

SEQ ID NO: 2180 - RNA, 19 nt, Homo sapiens
gaauggacaguuucaaaug

SEQ ID NO: 2181 - RNA, 19 nt, Homo sapiens
auuugaaacuguccauuca

SEQ ID NO: 2182 - RNA, 19 nt, Homo sapiens
ugaauggacaguuucaaau

SEQ ID NO: 2183 - RNA, 19 nt, Homo sapiens
uugaaacuguccauucaau

SEQ ID NO: 2184 - RNA, 19 nt, Homo sapiens
auugaauggacaguuucaa

SEQ ID NO: 2185 - RNA, 19 nt, Homo sapiens
ugaaacuguccauucaaug

SEQ ID NO: 2186 - RNA, 19 nt, Homo sapiens
cauugaauggacaguuuca

SEQ ID NO: 2187 - RNA, 19 nt, Homo sapiens
gaaacuguccauucaaugg

SEQ ID NO: 2188 - RNA, 19 nt, Homo sapiens
ccauugaauggacaguuuc

SEQ ID NO: 2189 - RNA, 19 nt, Homo sapiens
aaacuguccauucaaugga

SEQ ID NO: 2190 - RNA, 19 nt, Homo sapiens
uccauugaauggacaguuu

SEQ ID NO: 2191 - RNA, 19 nt, Homo sapiens
aacuguccauucaauggau

SEQ ID NO: 2192 - RNA, 19 nt, Homo sapiens
auccauugaauggacaguu

SEQ ID NO: 2193 - RNA, 19 nt, Homo sapiens
acuguccauucaauggaug

SEQ ID NO: 2194 - RNA, 19 nt, Homo sapiens
cauccauugaauggacagu

SEQ ID NO: 2195 - RNA, 19 nt, Homo sapiens
cuguccauucaauggaugg

SEQ ID NO: 2196 - RNA, 19 nt, Homo sapiens
ccauccauugaauggacag

SEQ ID NO: 2197 - RNA, 19 nt, Homo sapiens
uguccauucaauggauggg

SEQ ID NO: 2198 - RNA, 19 nt, Homo sapiens
cccauccauugaauggaca

SEQ ID NO: 2199 - RNA, 19 nt, Homo sapiens
guccauucaauggaugggg

SEQ ID NO: 2200 - RNA, 19 nt, Homo sapiens
ccccauccauugaauggac

SEQ ID NO: 2201 - RNA, 19 nt, Homo sapiens
uccauucaauggauggggc

SEQ ID NO: 2202 - RNA, 19 nt, Homo sapiens
gccccauccauugaaugga

SEQ ID NO: 2203 - RNA, 19 nt, Homo sapiens
gugugcccacuggaagagc

SEQ ID NO: 2204 - RNA, 19 nt, Homo sapiens
gcucuuccagugggcacac

SEQ ID NO: 2205 - RNA, 19 nt, Homo sapiens
ugugcccacuggaagagcu

SEQ ID NO: 2206 - RNA, 19 nt, Homo sapiens
agcucuuccagugggcaca

SEQ ID NO: 2207 - RNA, 19 nt, Homo sapiens
gugcccacuggaagagcug

SEQ ID NO: 2208 - RNA, 19 nt, Homo sapiens
cagcucuuccagugggcac

SEQ ID NO: 2209 - RNA, 19 nt, Homo sapiens
ugcccacuggaagagcugu

SEQ ID NO: 2210 - RNA, 19 nt, Homo sapiens
acagcucuuccagugggca

SEQ ID NO: 2211 - RNA, 19 nt, Homo sapiens
gcccacuggaagagcugug

SEQ ID NO: 2212 - RNA, 19 nt, Homo sapiens
cacagcucuuccagugggc

SEQ ID NO: 2213 - RNA, 19 nt, Homo sapiens
cccacuggaagagcugugu

SEQ ID NO: 2214 - RNA, 19 nt, Homo sapiens
acacagcucuuccaguggg

SEQ ID NO: 2215 - RNA, 19 nt, Homo sapiens
ccacuggaagagcugugug

SEQ ID NO: 2216 - RNA, 19 nt, Homo sapiens
cacacagcucuuccagugg

SEQ ID NO: 2217 - RNA, 19 nt, Homo sapiens
cacuggaagagcuguguga

SEQ ID NO: 2218 - RNA, 19 nt, Homo sapiens
ucacacagcucuuccagug

SEQ ID NO: 2219 - RNA, 19 nt, Homo sapiens
acuggaagagcugugugau

SEQ ID NO: 2220 - RNA, 19 nt, Homo sapiens
aucacacagcucuuccagu

SEQ ID NO: 2221 - RNA, 19 nt, Homo sapiens
cuggaagagcugugugaug

SEQ ID NO: 2222 - RNA, 19 nt, Homo sapiens
caucacacagcucuuccag

SEQ ID NO: 2223 - RNA, 19 nt, Homo sapiens
uggaagagcugugugaugu

SEQ ID NO: 2224 - RNA, 19 nt, Homo sapiens
acaucacacagcucuucca

SEQ ID NO: 2225 - RNA, 19 nt, Homo sapiens
ggaagagcugugugaugug

SEQ ID NO: 2226 - RNA, 19 nt, Homo sapiens
cacaucacacagcucuucc

SEQ ID NO: 2227 - RNA, 19 nt, Homo sapiens
gaagagcugugugaugugg

SEQ ID NO: 2228 - RNA, 19 nt, Homo sapiens
ccacaucacacagcucuuc

SEQ ID NO: 2229 - RNA, 19 nt, Homo sapiens
aagagcugugugauguggc

SEQ ID NO: 2230 - RNA, 19 nt, Homo sapiens
gccacaucacacagcucuu

SEQ ID NO: 2231 - RNA, 19 nt, Homo sapiens
agagcugugugauguggcc

SEQ ID NO: 2232 - RNA, 19 nt, Homo sapiens
ggccacaucacacagcucu

SEQ ID NO: 2233 - RNA, 19 nt, Homo sapiens
gagcugugugauguggccc

SEQ ID NO: 2234 - RNA, 19 nt, Homo sapiens
gggccacaucacacagcuc

SEQ ID NO: 2235 - RNA, 19 nt, Homo sapiens
agcugugugauguggccca

SEQ ID NO: 2236 - RNA, 19 nt, Homo sapiens
ugggccacaucacacagcu

SEQ ID NO: 2237 - RNA, 19 nt, Homo sapiens
gcugugugauguggcccau

SEQ ID NO: 2238 - RNA, 19 nt, Homo sapiens
augggccacaucacacagc

SEQ ID NO: 2239 - RNA, 19 nt, Homo sapiens
cugugugauguggcccaug

SEQ ID NO: 2240 - RNA, 19 nt, Homo sapiens
caugggccacaucacacag

SEQ ID NO: 2241 - RNA, 19 nt, Homo sapiens
ugugugauguggcccauga

SEQ ID NO: 2242 - RNA, 19 nt, Homo sapiens
ucaugggccacaucacaca

SEQ ID NO: 2243 - RNA, 19 nt, Homo sapiens
gugugauguggcccaugag

SEQ ID NO: 2244 - RNA, 19 nt, Homo sapiens
cucaugggccacaucacac

SEQ ID NO: 2245 - RNA, 19 nt, Homo sapiens
ugugauguggcccaugagu

SEQ ID NO: 2246 - RNA, 19 nt, Homo sapiens
acucaugggccacaucaca

SEQ ID NO: 2247 - RNA, 19 nt, Homo sapiens
gauguggcccaugaguuug

SEQ ID NO: 2248 - RNA, 19 nt, Homo sapiens
caaacucaugggccacauc

SEQ ID NO: 2249 - RNA, 19 nt, Homo sapiens
auguggcccaugaguuugg

SEQ ID NO: 2250 - RNA, 19 nt, Homo sapiens
ccaaacucaugggccacau

SEQ ID NO: 2251 - RNA, 19 nt, Homo sapiens
uguggcccaugaguuugga

SEQ ID NO: 2252 - RNA, 19 nt, Homo sapiens
uccaaacucaugggccaca

SEQ ID NO: 2253 - RNA, 19 nt, Homo sapiens
guggcccaugaguuuggag

SEQ ID NO: 2254 - RNA, 19 nt, Homo sapiens
cuccaaacucaugggccac

SEQ ID NO: 2255 - RNA, 19 nt, Homo sapiens
uggcccaugaguuuggagc

SEQ ID NO: 2256 - RNA, 19 nt, Homo sapiens
gcuccaaacucaugggcca

SEQ ID NO: 2257 - RNA, 19 nt, Homo sapiens
ggcccaugaguuuggagca

SEQ ID NO: 2258 - RNA, 19 nt, Homo sapiens
ugcuccaaacucaugggcc

SEQ ID NO: 2259 - RNA, 19 nt, Homo sapiens
gcccaugaguuuggagcaa

SEQ ID NO: 2260 - RNA, 19 nt, Homo sapiens
uugcuccaaacucaugggc

SEQ ID NO: 2261 - RNA, 19 nt, Homo sapiens
cccaugaguuuggagcaau

SEQ ID NO: 2262 - RNA, 19 nt, Homo sapiens
auugcuccaaacucauggg

SEQ ID NO: 2263 - RNA, 19 nt, Homo sapiens
ccaugaguuuggagcaauc

SEQ ID NO: 2264 - RNA, 19 nt, Homo sapiens
gauugcuccaaacucaugg

SEQ ID NO: 2265 - RNA, 19 nt, Homo sapiens
augaguuuggagcaaucac

SEQ ID NO: 2266 - RNA, 19 nt, Homo sapiens
gugauugcuccaaacucau

SEQ ID NO: 2267 - RNA, 19 nt, Homo sapiens
ugaguuuggagcaaucacc

SEQ ID NO: 2268 - RNA, 19 nt, Homo sapiens
ggugauugcuccaaacuca

SEQ ID NO: 2269 - RNA, 19 nt, Homo sapiens
aguuuggagcaaucaccuu

SEQ ID NO: 2270 - RNA, 19 nt, Homo sapiens
aaggugauugcuccaaacu

SEQ ID NO: 2271 - RNA, 19 nt, Homo sapiens
guuuggagcaaucaccuuc

SEQ ID NO: 2272 - RNA, 19 nt, Homo sapiens
gaaggugauugcuccaaac

SEQ ID NO: 2273 - RNA, 19 nt, Homo sapiens
uuuggagcaaucaccuucg

SEQ ID NO: 2274 - RNA, 19 nt, Homo sapiens
cgaaggugauugcuccaaa

SEQ ID NO: 2275 - RNA, 19 nt, Homo sapiens
uuggagcaaucaccuucgu

SEQ ID NO: 2276 - RNA, 19 nt, Homo sapiens
acgaaggugauugcuccaa

SEQ ID NO: 2277 - RNA, 19 nt, Homo sapiens
uggagcaaucaccuucgug

SEQ ID NO: 2278 - RNA, 19 nt, Homo sapiens
cacgaaggugauugcucca

SEQ ID NO: 2279 - RNA, 19 nt, Homo sapiens
ggagcaaucaccuucgugg

SEQ ID NO: 2280 - RNA, 19 nt, Homo sapiens
ccacgaaggugauugcucc

SEQ ID NO: 2281 - RNA, 19 nt, Homo sapiens
gagcaaucaccuucgugga

SEQ ID NO: 2282 - RNA, 19 nt, Homo sapiens
uccacgaaggugauugcuc

SEQ ID NO: 2283 - RNA, 19 nt, Homo sapiens
agcaaucaccuucguggau

SEQ ID NO: 2284 - RNA, 19 nt, Homo sapiens
auccacgaaggugauugcu

SEQ ID NO: 2285 - RNA, 19 nt, Homo sapiens
gcaaucaccuucguggaug

SEQ ID NO: 2286 - RNA, 19 nt, Homo sapiens
cauccacgaaggugauugc

SEQ ID NO: 2287 - RNA, 19 nt, Homo sapiens
caaucaccuucguggauga

SEQ ID NO: 2288 - RNA, 19 nt, Homo sapiens
ucauccacgaaggugauug

SEQ ID NO: 2289 - RNA, 19 nt, Homo sapiens
aaucaccuucguggaugag

SEQ ID NO: 2290 - RNA, 19 nt, Homo sapiens
cucauccacgaaggugauu

SEQ ID NO: 2291 - RNA, 19 nt, Homo sapiens
aucaccuucguggaugagg

SEQ ID NO: 2292 - RNA, 19 nt, Homo sapiens
ccucauccacgaaggugau

SEQ ID NO: 2293 - RNA, 19 nt, Homo sapiens
ucaccuucguggaugaggu

SEQ ID NO: 2294 - RNA, 19 nt, Homo sapiens
accucauccacgaagguga

SEQ ID NO: 2295 - RNA, 19 nt, Homo sapiens
caccuucguggaugagguc

SEQ ID NO: 2296 - RNA, 19 nt, Homo sapiens
gaccucauccacgaaggug

SEQ ID NO: 2297 - RNA, 19 nt, Homo sapiens
accuucguggaugaggucc

SEQ ID NO: 2298 - RNA, 19 nt, Homo sapiens
ggaccucauccacgaaggu

SEQ ID NO: 2299 - RNA, 19 nt, Homo sapiens
ccuucguggaugaggucca

SEQ ID NO: 2300 - RNA, 19 nt, Homo sapiens
uggaccucauccacgaagg

SEQ ID NO: 2301 - RNA, 19 nt, Homo sapiens
cuucguggaugagguccac

SEQ ID NO: 2302 - RNA, 19 nt, Homo sapiens
guggaccucauccacgaag

SEQ ID NO: 2303 - RNA, 19 nt, Homo sapiens
uucguggaugagguccacg

SEQ ID NO: 2304 - RNA, 19 nt, Homo sapiens
cguggaccucauccacgaa

SEQ ID NO: 2305 - RNA, 19 nt, Homo sapiens
ucguggaugagguccacgc

SEQ ID NO: 2306 - RNA, 19 nt, Homo sapiens
gcguggaccucauccacga

SEQ ID NO: 2307 - RNA, 19 nt, Homo sapiens
cguggaugagguccacgca

SEQ ID NO: 2308 - RNA, 19 nt, Homo sapiens
ugcguggaccucauccacg

SEQ ID NO: 2309 - RNA, 19 nt, Homo sapiens
guggaugagguccacgcag

SEQ ID NO: 2310 - RNA, 19 nt, Homo sapiens
cugcguggaccucauccac

SEQ ID NO: 2311 - RNA, 19 nt, Homo sapiens
uggaugagguccacgcagu

SEQ ID NO: 2312 - RNA, 19 nt, Homo sapiens
acugcguggaccucaucca

SEQ ID NO: 2313 - RNA, 19 nt, Homo sapiens
ggaugagguccacgcagug

SEQ ID NO: 2314 - RNA, 19 nt, Homo sapiens
cacugcguggaccucaucc

SEQ ID NO: 2315 - RNA, 19 nt, Homo sapiens
gaugagguccacgcagugg

SEQ ID NO: 2316 - RNA, 19 nt, Homo sapiens
ccacugcguggaccucauc

SEQ ID NO: 2317 - RNA, 19 nt, Homo sapiens
augagguccacgcaguggg

SEQ ID NO: 2318 - RNA, 19 nt, Homo sapiens
cccacugcguggaccucau

SEQ ID NO: 2319 - RNA, 19 nt, Homo sapiens
ugagguccacgcagugggg

SEQ ID NO: 2320 - RNA, 19 nt, Homo sapiens
ccccacugcguggaccuca

SEQ ID NO: 2321 - RNA, 19 nt, Homo sapiens
gagguccacgcaguggggc

SEQ ID NO: 2322 - RNA, 19 nt, Homo sapiens
gccccacugcguggaccuc

SEQ ID NO: 2323 - RNA, 19 nt, Homo sapiens
agguccacgcaguggggcu

SEQ ID NO: 2324 - RNA, 19 nt, Homo sapiens
agccccacugcguggaccu

SEQ ID NO: 2325 - RNA, 19 nt, Homo sapiens
ggggcucgaggcggaggga

SEQ ID NO: 2326 - RNA, 19 nt, Homo sapiens
ucccuccgccucgagcccc

SEQ ID NO: 2327 - RNA, 19 nt, Homo sapiens
gggcucgaggcggagggau

SEQ ID NO: 2328 - RNA, 19 nt, Homo sapiens
aucccuccgccucgagccc

SEQ ID NO: 2329 - RNA, 19 nt, Homo sapiens
ggcucgaggcggagggauu

SEQ ID NO: 2330 - RNA, 19 nt, Homo sapiens
aaucccuccgccucgagcc

SEQ ID NO: 2331 - RNA, 19 nt, Homo sapiens
gcucgaggcggagggauug

SEQ ID NO: 2332 - RNA, 19 nt, Homo sapiens
caaucccuccgccucgagc

SEQ ID NO: 2333 - RNA, 19 nt, Homo sapiens
cucgaggcggagggauugg

SEQ ID NO: 2334 - RNA, 19 nt, Homo sapiens
ccaaucccuccgccucgag

SEQ ID NO: 2335 - RNA, 19 nt, Homo sapiens
ucgaggcggagggauuggg

SEQ ID NO: 2336 - RNA, 19 nt, Homo sapiens
cccaaucccuccgccucga

SEQ ID NO: 2337 - RNA, 19 nt, Homo sapiens
cgaggcggagggauugggg

SEQ ID NO: 2338 - RNA, 19 nt, Homo sapiens
ccccaaucccuccgccucg

SEQ ID NO: 2339 - RNA, 19 nt, Homo sapiens
gaggcggagggauugggga

SEQ ID NO: 2340 - RNA, 19 nt, Homo sapiens
uccccaaucccuccgccuc

SEQ ID NO: 2341 - RNA, 19 nt, Homo sapiens
aggcggagggauuggggau

SEQ ID NO: 2342 - RNA, 19 nt, Homo sapiens
auccccaaucccuccgccu

SEQ ID NO: 2343 - RNA, 19 nt, Homo sapiens
ggcggagggauuggggauc

SEQ ID NO: 2344 - RNA, 19 nt, Homo sapiens
gauccccaaucccuccgcc

SEQ ID NO: 2345 - RNA, 19 nt, Homo sapiens
gcggagggauuggggaucg

SEQ ID NO: 2346 - RNA, 19 nt, Homo sapiens
cgauccccaaucccuccgc

SEQ ID NO: 2347 - RNA, 19 nt, Homo sapiens
cggagggauuggggaucgg

SEQ ID NO: 2348 - RNA, 19 nt, Homo sapiens
ccgauccccaaucccuccg

SEQ ID NO: 2349 - RNA, 19 nt, Homo sapiens
ggagggauuggggaucggg

SEQ ID NO: 2350 - RNA, 19 nt, Homo sapiens
cccgauccccaaucccucc

SEQ ID NO: 2351 - RNA, 19 nt, Homo sapiens
gagggauuggggaucggga

SEQ ID NO: 2352 - RNA, 19 nt, Homo sapiens
ucccgauccccaaucccuc

SEQ ID NO: 2353 - RNA, 19 nt, Homo sapiens
agggauuggggaucgggau

SEQ ID NO: 2354 - RNA, 19 nt, Homo sapiens
aucccgauccccaaucccu

SEQ ID NO: 2355 - RNA, 19 nt, Homo sapiens
gggauuggggaucgggaug

SEQ ID NO: 2356 - RNA, 19 nt, Homo sapiens
caucccgauccccaauccc

SEQ ID NO: 2357 - RNA, 19 nt, Homo sapiens
ggauuggggaucgggaugg

SEQ ID NO: 2358 - RNA, 19 nt, Homo sapiens
ccaucccgauccccaaucc

SEQ ID NO: 2359 - RNA, 19 nt, Homo sapiens
gauuggggaucgggaugga

SEQ ID NO: 2360 - RNA, 19 nt, Homo sapiens
uccaucccgauccccaauc

SEQ ID NO: 2361 - RNA, 19 nt, Homo sapiens
auuggggaucgggauggag

SEQ ID NO: 2362 - RNA, 19 nt, Homo sapiens
cuccaucccgauccccaau

SEQ ID NO: 2363 - RNA, 19 nt, Homo sapiens
uuggggaucgggauggagu

SEQ ID NO: 2364 - RNA, 19 nt, Homo sapiens
acuccaucccgauccccaa

SEQ ID NO: 2365 - RNA, 19 nt, Homo sapiens
uggggaucgggauggaguc

SEQ ID NO: 2366 - RNA, 19 nt, Homo sapiens
gacuccaucccgaucccca

SEQ ID NO: 2367 - RNA, 19 nt, Homo sapiens
gggaucgggauggagucau

SEQ ID NO: 2368 - RNA, 19 nt, Homo sapiens
augacuccaucccgauccc

SEQ ID NO: 2369 - RNA, 19 nt, Homo sapiens
ggaucgggauggagucaug

SEQ ID NO: 2370 - RNA, 19 nt, Homo sapiens
caugacuccaucccgaucc

SEQ ID NO: 2371 - RNA, 19 nt, Homo sapiens
gaucgggauggagucaugc

SEQ ID NO: 2372 - RNA, 19 nt, Homo sapiens
gcaugacuccaucccgauc

SEQ ID NO: 2373 - RNA, 19 nt, Homo sapiens
aucgggauggagucaugcc

SEQ ID NO: 2374 - RNA, 19 nt, Homo sapiens
ggcaugacuccaucccgau

SEQ ID NO: 2375 - RNA, 19 nt, Homo sapiens
ucgggauggagucaugcca

SEQ ID NO: 2376 - RNA, 19 nt, Homo sapiens
uggcaugacuccaucccga

SEQ ID NO: 2377 - RNA, 19 nt, Homo sapiens
cgggauggagucaugccaa

SEQ ID NO: 2378 - RNA, 19 nt, Homo sapiens
uuggcaugacuccaucccg

SEQ ID NO: 2379 - RNA, 19 nt, Homo sapiens
gggauggagucaugccaaa

SEQ ID NO: 2380 - RNA, 19 nt, Homo sapiens
uuuggcaugacuccauccc

SEQ ID NO: 2381 - RNA, 19 nt, Homo sapiens
ggauggagucaugccaaaa

SEQ ID NO: 2382 - RNA, 19 nt, Homo sapiens
uuuuggcaugacuccaucc

SEQ ID NO: 2383 - RNA, 19 nt, Homo sapiens
gauggagucaugccaaaaa

SEQ ID NO: 2384 - RNA, 19 nt, Homo sapiens
uuuuuggcaugacuccauc

SEQ ID NO: 2385 - RNA, 19 nt, Homo sapiens
auggagucaugccaaaaau

SEQ ID NO: 2386 - RNA, 19 nt, Homo sapiens
auuuuuggcaugacuccau

SEQ ID NO: 2387 - RNA, 19 nt, Homo sapiens
uggagucaugccaaaaaug

SEQ ID NO: 2388 - RNA, 19 nt, Homo sapiens
cauuuuuggcaugacucca

SEQ ID NO: 2389 - RNA, 19 nt, Homo sapiens
ggagucaugccaaaaaugg

SEQ ID NO: 2390 - RNA, 19 nt, Homo sapiens
ccauuuuuggcaugacucc

SEQ ID NO: 2391 - RNA, 19 nt, Homo sapiens
gagucaugccaaaaaugga

SEQ ID NO: 2392 - RNA, 19 nt, Homo sapiens
uccauuuuuggcaugacuc

SEQ ID NO: 2393 - RNA, 19 nt, Homo sapiens
agucaugccaaaaauggac

SEQ ID NO: 2394 - RNA, 19 nt, Homo sapiens
guccauuuuuggcaugacu

SEQ ID NO: 2395 - RNA, 19 nt, Homo sapiens
ucaugccaaaaauggacau

SEQ ID NO: 2396 - RNA, 19 nt, Homo sapiens
auguccauuuuuggcauga

SEQ ID NO: 2397 - RNA, 19 nt, Homo sapiens
caugccaaaaauggacauc

SEQ ID NO: 2398 - RNA, 19 nt, Homo sapiens
gauguccauuuuuggcaug

SEQ ID NO: 2399 - RNA, 19 nt, Homo sapiens
gccaaaaauggacaucauu

SEQ ID NO: 2400 - RNA, 19 nt, Homo sapiens
aaugauguccauuuuuggc

SEQ ID NO: 2401 - RNA, 19 nt, Homo sapiens
caaaaauggacaucauuuc

SEQ ID NO: 2402 - RNA, 19 nt, Homo sapiens
gaaaugauguccauuuuug

SEQ ID NO: 2403 - RNA, 19 nt, Homo sapiens
aaaaauggacaucauuucu

SEQ ID NO: 2404 - RNA, 19 nt, Homo sapiens
agaaaugauguccauuuuu

SEQ ID NO: 2405 - RNA, 19 nt, Homo sapiens
aaaauggacaucauuucug

SEQ ID NO: 2406 - RNA, 19 nt, Homo sapiens
cagaaaugauguccauuuu

SEQ ID NO: 2407 - RNA, 19 nt, Homo sapiens
aaauggacaucauuucugg

SEQ ID NO: 2408 - RNA, 19 nt, Homo sapiens
ccagaaaugauguccauuu

SEQ ID NO: 2409 - RNA, 19 nt, Homo sapiens
aauggacaucauuucugga

SEQ ID NO: 2410 - RNA, 19 nt, Homo sapiens
uccagaaaugauguccauu

SEQ ID NO: 2411 - RNA, 19 nt, Homo sapiens
auggacaucauuucuggaa

SEQ ID NO: 2412 - RNA, 19 nt, Homo sapiens
uuccagaaaugauguccau

SEQ ID NO: 2413 - RNA, 19 nt, Homo sapiens
uggacaucauuucuggaac

SEQ ID NO: 2414 - RNA, 19 nt, Homo sapiens
guuccagaaaugaugucca

SEQ ID NO: 2415 - RNA, 19 nt, Homo sapiens
ggacaucauuucuggaaca

SEQ ID NO: 2416 - RNA, 19 nt, Homo sapiens
uguuccagaaaugaugucc

SEQ ID NO: 2417 - RNA, 19 nt, Homo sapiens
gacaucauuucuggaacac

SEQ ID NO: 2418 - RNA, 19 nt, Homo sapiens
guguuccagaaaugauguc

SEQ ID NO: 2419 - RNA, 19 nt, Homo sapiens
acaucauuucuggaacacu

SEQ ID NO: 2420 - RNA, 19 nt, Homo sapiens
aguguuccagaaaugaugu

SEQ ID NO: 2421 - RNA, 19 nt, Homo sapiens
caucauuucuggaacacuu

SEQ ID NO: 2422 - RNA, 19 nt, Homo sapiens
aaguguuccagaaaugaug

SEQ ID NO: 2423 - RNA, 19 nt, Homo sapiens
aucauuucuggaacacuug

SEQ ID NO: 2424 - RNA, 19 nt, Homo sapiens
caaguguuccagaaaugau

SEQ ID NO: 2425 - RNA, 19 nt, Homo sapiens
ucauuucuggaacacuugg

SEQ ID NO: 2426 - RNA, 19 nt, Homo sapiens
ccaaguguuccagaaauga

SEQ ID NO: 2427 - RNA, 19 nt, Homo sapiens
cauuucuggaacacuuggc

SEQ ID NO: 2428 - RNA, 19 nt, Homo sapiens
gccaaguguuccagaaaug

SEQ ID NO: 2429 - RNA, 19 nt, Homo sapiens
auuucuggaacacuuggca

SEQ ID NO: 2430 - RNA, 19 nt, Homo sapiens
ugccaaguguuccagaaau

SEQ ID NO: 2431 - RNA, 19 nt, Homo sapiens
uuucuggaacacuuggcaa

SEQ ID NO: 2432 - RNA, 19 nt, Homo sapiens
uugccaaguguuccagaaa

SEQ ID NO: 2433 - RNA, 19 nt, Homo sapiens
uucuggaacacuuggcaaa

SEQ ID NO: 2434 - RNA, 19 nt, Homo sapiens
uuugccaaguguuccagaa

SEQ ID NO: 2435 - RNA, 19 nt, Homo sapiens
ucuggaacacuuggcaaag

SEQ ID NO: 2436 - RNA, 19 nt, Homo sapiens
cuuugccaaguguuccaga

SEQ ID NO: 2437 - RNA, 19 nt, Homo sapiens
cuggaacacuuggcaaagc

SEQ ID NO: 2438 - RNA, 19 nt, Homo sapiens
gcuuugccaaguguuccag

SEQ ID NO: 2439 - RNA, 19 nt, Homo sapiens
uggaacacuuggcaaagcc

SEQ ID NO: 2440 - RNA, 19 nt, Homo sapiens
ggcuuugccaaguguucca

SEQ ID NO: 2441 - RNA, 19 nt, Homo sapiens
ggaacacuuggcaaagccu

SEQ ID NO: 2442 - RNA, 19 nt, Homo sapiens
aggcuuugccaaguguucc

SEQ ID NO: 2443 - RNA, 19 nt, Homo sapiens
gaacacuuggcaaagccuu

SEQ ID NO: 2444 - RNA, 19 nt, Homo sapiens
aaggcuuugccaaguguuc

SEQ ID NO: 2445 - RNA, 19 nt, Homo sapiens
aacacuuggcaaagccuuu

SEQ ID NO: 2446 - RNA, 19 nt, Homo sapiens
aaaggcuuugccaaguguu

SEQ ID NO: 2447 - RNA, 19 nt, Homo sapiens
acacuuggcaaagccuuug

SEQ ID NO: 2448 - RNA, 19 nt, Homo sapiens
caaaggcuuugccaagugu

SEQ ID NO: 2449 - RNA, 19 nt, Homo sapiens
cacuuggcaaagccuuugg

SEQ ID NO: 2450 - RNA, 19 nt, Homo sapiens
ccaaaggcuuugccaagug

SEQ ID NO: 2451 - RNA, 19 nt, Homo sapiens
uguguuggaggguacaucg

SEQ ID NO: 2452 - RNA, 19 nt, Homo sapiens
cgauguacccuccaacaca

SEQ ID NO: 2453 - RNA, 19 nt, Homo sapiens
guguuggaggguacaucgc

SEQ ID NO: 2454 - RNA, 19 nt, Homo sapiens
gcgauguacccuccaacac

SEQ ID NO: 2455 - RNA, 19 nt, Homo sapiens
uguuggaggguacaucgcc

SEQ ID NO: 2456 - RNA, 19 nt, Homo sapiens
ggcgauguacccuccaaca

SEQ ID NO: 2457 - RNA, 19 nt, Homo sapiens
guuggaggguacaucgcca

SEQ ID NO: 2458 - RNA, 19 nt, Homo sapiens
uggcgauguacccuccaac

SEQ ID NO: 2459 - RNA, 19 nt, Homo sapiens
uuggaggguacaucgccag

SEQ ID NO: 2460 - RNA, 19 nt, Homo sapiens
cuggcgauguacccuccaa

SEQ ID NO: 2461 - RNA, 19 nt, Homo sapiens
uggaggguacaucgccagc

SEQ ID NO: 2462 - RNA, 19 nt, Homo sapiens
gcuggcgauguacccucca

SEQ ID NO: 2463 - RNA, 19 nt, Homo sapiens
ggaggguacaucgccagca

SEQ ID NO: 2464 - RNA, 19 nt, Homo sapiens
ugcuggcgauguacccucc

SEQ ID NO: 2465 - RNA, 19 nt, Homo sapiens
gaggguacaucgccagcac

SEQ ID NO: 2466 - RNA, 19 nt, Homo sapiens
gugcuggcgauguacccuc

SEQ ID NO: 2467 - RNA, 19 nt, Homo sapiens
aggguacaucgccagcacg

SEQ ID NO: 2468 - RNA, 19 nt, Homo sapiens
cgugcuggcgauguacccu

SEQ ID NO: 2469 - RNA, 19 nt, Homo sapiens
ggguacaucgccagcacga

SEQ ID NO: 2470 - RNA, 19 nt, Homo sapiens
ucgugcuggcgauguaccc

SEQ ID NO: 2471 - RNA, 19 nt, Homo sapiens
gguacaucgccagcacgag

SEQ ID NO: 2472 - RNA, 19 nt, Homo sapiens
cucgugcuggcgauguacc

SEQ ID NO: 2473 - RNA, 19 nt, Homo sapiens
guacaucgccagcacgagu

SEQ ID NO: 2474 - RNA, 19 nt, Homo sapiens
acucgugcuggcgauguac

SEQ ID NO: 2475 - RNA, 19 nt, Homo sapiens
uacaucgccagcacgaguu

SEQ ID NO: 2476 - RNA, 19 nt, Homo sapiens
aacucgugcuggcgaugua

SEQ ID NO: 2477 - RNA, 19 nt, Homo sapiens
acaucgccagcacgaguuc

SEQ ID NO: 2478 - RNA, 19 nt, Homo sapiens
gaacucgugcuggcgaugu

SEQ ID NO: 2479 - RNA, 19 nt, Homo sapiens
caucgccagcacgaguucu

SEQ ID NO: 2480 - RNA, 19 nt, Homo sapiens
agaacucgugcuggcgaug

SEQ ID NO: 2481 - RNA, 19 nt, Homo sapiens
aucgccagcacgaguucuc

SEQ ID NO: 2482 - RNA, 19 nt, Homo sapiens
gagaacucgugcuggcgau

SEQ ID NO: 2483 - RNA, 19 nt, Homo sapiens
ucgccagcacgaguucucu

SEQ ID NO: 2484 - RNA, 19 nt, Homo sapiens
agagaacucgugcuggcga

SEQ ID NO: 2485 - RNA, 19 nt, Homo sapiens
cgccagcacgaguucucug

SEQ ID NO: 2486 - RNA, 19 nt, Homo sapiens
cagagaacucgugcuggcg

SEQ ID NO: 2487 - RNA, 19 nt, Homo sapiens
gccagcacgaguucucuga

SEQ ID NO: 2488 - RNA, 19 nt, Homo sapiens
ucagagaacucgugcuggc

SEQ ID NO: 2489 - RNA, 19 nt, Homo sapiens
ccagcacgaguucucugau

SEQ ID NO: 2490 - RNA, 19 nt, Homo sapiens
aucagagaacucgugcugg

SEQ ID NO: 2491 - RNA, 19 nt, Homo sapiens
cagcacgaguucucugauu

SEQ ID NO: 2492 - RNA, 19 nt, Homo sapiens
aaucagagaacucgugcug

SEQ ID NO: 2493 - RNA, 19 nt, Homo sapiens
agcacgaguucucugauug

SEQ ID NO: 2494 - RNA, 19 nt, Homo sapiens
caaucagagaacucgugcu

SEQ ID NO: 2495 - RNA, 19 nt, Homo sapiens
gcacgaguucucugauuga

SEQ ID NO: 2496 - RNA, 19 nt, Homo sapiens
ucaaucagagaacucgugc

SEQ ID NO: 2497 - RNA, 19 nt, Homo sapiens
cacgaguucucugauugac

SEQ ID NO: 2498 - RNA, 19 nt, Homo sapiens
gucaaucagagaacucgug

SEQ ID NO: 2499 - RNA, 19 nt, Homo sapiens
cgaguucucugauugacac

SEQ ID NO: 2500 - RNA, 19 nt, Homo sapiens
gugucaaucagagaacucg

SEQ ID NO: 2501 - RNA, 19 nt, Homo sapiens
guacgguccuaugcugcug

SEQ ID NO: 2502 - RNA, 19 nt, Homo sapiens
cagcagcauaggaccguac

SEQ ID NO: 2503 - RNA, 19 nt, Homo sapiens
uacgguccuaugcugcugg

SEQ ID NO: 2504 - RNA, 19 nt, Homo sapiens
ccagcagcauaggaccgua

SEQ ID NO: 2505 - RNA, 19 nt, Homo sapiens
acgguccuaugcugcuggc

SEQ ID NO: 2506 - RNA, 19 nt, Homo sapiens
gccagcagcauaggaccgu

SEQ ID NO: 2507 - RNA, 19 nt, Homo sapiens
cgguccuaugcugcuggcu

SEQ ID NO: 2508 - RNA, 19 nt, Homo sapiens
agccagcagcauaggaccg

SEQ ID NO: 2509 - RNA, 19 nt, Homo sapiens
gguccuaugcugcuggcuu

SEQ ID NO: 2510 - RNA, 19 nt, Homo sapiens
aagccagcagcauaggacc

SEQ ID NO: 2511 - RNA, 19 nt, Homo sapiens
guccuaugcugcuggcuuc

SEQ ID NO: 2512 - RNA, 19 nt, Homo sapiens
gaagccagcagcauaggac

SEQ ID NO: 2513 - RNA, 19 nt, Homo sapiens
uccuaugcugcuggcuuca

SEQ ID NO: 2514 - RNA, 19 nt, Homo sapiens
ugaagccagcagcauagga

SEQ ID NO: 2515 - RNA, 19 nt, Homo sapiens
ccuaugcugcuggcuucau

SEQ ID NO: 2516 - RNA, 19 nt, Homo sapiens
augaagccagcagcauagg

SEQ ID NO: 2517 - RNA, 19 nt, Homo sapiens
cuaugcugcuggcuucauc

SEQ ID NO: 2518 - RNA, 19 nt, Homo sapiens
gaugaagccagcagcauag

SEQ ID NO: 2519 - RNA, 19 nt, Homo sapiens
uaugcugcuggcuucaucu

SEQ ID NO: 2520 - RNA, 19 nt, Homo sapiens
agaugaagccagcagcaua

SEQ ID NO: 2521 - RNA, 19 nt, Homo sapiens
augcugcuggcuucaucuu

SEQ ID NO: 2522 - RNA, 19 nt, Homo sapiens
aagaugaagccagcagcau

SEQ ID NO: 2523 - RNA, 19 nt, Homo sapiens
ugcugcuggcuucaucuuc

SEQ ID NO: 2524 - RNA, 19 nt, Homo sapiens
gaagaugaagccagcagca

SEQ ID NO: 2525 - RNA, 19 nt, Homo sapiens
gcugcuggcuucaucuuca

SEQ ID NO: 2526 - RNA, 19 nt, Homo sapiens
ugaagaugaagccagcagc

SEQ ID NO: 2527 - RNA, 19 nt, Homo sapiens
cugcuggcuucaucuucac

SEQ ID NO: 2528 - RNA, 19 nt, Homo sapiens
gugaagaugaagccagcag

SEQ ID NO: 2529 - RNA, 19 nt, Homo sapiens
ugcuggcuucaucuucacc

SEQ ID NO: 2530 - RNA, 19 nt, Homo sapiens
ggugaagaugaagccagca

SEQ ID NO: 2531 - RNA, 19 nt, Homo sapiens
gcuggcuucaucuucacca

SEQ ID NO: 2532 - RNA, 19 nt, Homo sapiens
uggugaagaugaagccagc

SEQ ID NO: 2533 - RNA, 19 nt, Homo sapiens
cuggcuucaucuucaccac

SEQ ID NO: 2534 - RNA, 19 nt, Homo sapiens
guggugaagaugaagccag

SEQ ID NO: 2535 - RNA, 19 nt, Homo sapiens
uggcuucaucuucaccacc

SEQ ID NO: 2536 - RNA, 19 nt, Homo sapiens
gguggugaagaugaagcca

SEQ ID NO: 2537 - RNA, 19 nt, Homo sapiens
ggcuucaucuucaccaccu

SEQ ID NO: 2538 - RNA, 19 nt, Homo sapiens
agguggugaagaugaagcc

SEQ ID NO: 2539 - RNA, 19 nt, Homo sapiens
gcuucaucuucaccaccuc

SEQ ID NO: 2540 - RNA, 19 nt, Homo sapiens
gagguggugaagaugaagc

SEQ ID NO: 2541 - RNA, 19 nt, Homo sapiens
cuucaucuucaccaccucu

SEQ ID NO: 2542 - RNA, 19 nt, Homo sapiens
agagguggugaagaugaag

SEQ ID NO: 2543 - RNA, 19 nt, Homo sapiens
uucaucuucaccaccucuc

SEQ ID NO: 2544 - RNA, 19 nt, Homo sapiens
gagagguggugaagaugaa

SEQ ID NO: 2545 - RNA, 19 nt, Homo sapiens
ucaucuucaccaccucucu

SEQ ID NO: 2546 - RNA, 19 nt, Homo sapiens
agagagguggugaagauga

SEQ ID NO: 2547 - RNA, 19 nt, Homo sapiens
caucuucaccaccucucug

SEQ ID NO: 2548 - RNA, 19 nt, Homo sapiens
cagagagguggugaagaug

SEQ ID NO: 2549 - RNA, 19 nt, Homo sapiens
aucuucaccaccucucugc

SEQ ID NO: 2550 - RNA, 19 nt, Homo sapiens
gcagagagguggugaagau

SEQ ID NO: 2551 - RNA, 19 nt, Homo sapiens
ucuucaccaccucucugcc

SEQ ID NO: 2552 - RNA, 19 nt, Homo sapiens
ggcagagagguggugaaga

SEQ ID NO: 2553 - RNA, 19 nt, Homo sapiens
cuucaccaccucucugcca

SEQ ID NO: 2554 - RNA, 19 nt, Homo sapiens
uggcagagagguggugaag

SEQ ID NO: 2555 - RNA, 19 nt, Homo sapiens
uucaccaccucucugccac

SEQ ID NO: 2556 - RNA, 19 nt, Homo sapiens
guggcagagagguggugaa

SEQ ID NO: 2557 - RNA, 19 nt, Homo sapiens
ucaccaccucucugccacc

SEQ ID NO: 2558 - RNA, 19 nt, Homo sapiens
gguggcagagaggugguga

SEQ ID NO: 2559 - RNA, 19 nt, Homo sapiens
caccaccucucugccaccc

SEQ ID NO: 2560 - RNA, 19 nt, Homo sapiens
ggguggcagagagguggug

SEQ ID NO: 2561 - RNA, 19 nt, Homo sapiens
accaccucucugccaccca

SEQ ID NO: 2562 - RNA, 19 nt, Homo sapiens
uggguggcagagagguggu

SEQ ID NO: 2563 - RNA, 19 nt, Homo sapiens
ccaccucucugccacccau

SEQ ID NO: 2564 - RNA, 19 nt, Homo sapiens
auggguggcagagaggugg

SEQ ID NO: 2565 - RNA, 19 nt, Homo sapiens
caccucucugccacccaug

SEQ ID NO: 2566 - RNA, 19 nt, Homo sapiens
cauggguggcagagaggug

SEQ ID NO: 2567 - RNA, 19 nt, Homo sapiens
accucucugccacccaugc

SEQ ID NO: 2568 - RNA, 19 nt, Homo sapiens
gcauggguggcagagaggu

SEQ ID NO: 2569 - RNA, 19 nt, Homo sapiens
ccucucugccacccaugcu

SEQ ID NO: 2570 - RNA, 19 nt, Homo sapiens
agcauggguggcagagagg

SEQ ID NO: 2571 - RNA, 19 nt, Homo sapiens
cucucugccacccaugcug

SEQ ID NO: 2572 - RNA, 19 nt, Homo sapiens
cagcauggguggcagagag

SEQ ID NO: 2573 - RNA, 19 nt, Homo sapiens
ucucugccacccaugcugc

SEQ ID NO: 2574 - RNA, 19 nt, Homo sapiens
gcagcauggguggcagaga

SEQ ID NO: 2575 - RNA, 19 nt, Homo sapiens
cucugccacccaugcugcu

SEQ ID NO: 2576 - RNA, 19 nt, Homo sapiens
agcagcauggguggcagag

SEQ ID NO: 2577 - RNA, 19 nt, Homo sapiens
ucugccacccaugcugcug

SEQ ID NO: 2578 - RNA, 19 nt, Homo sapiens
cagcagcauggguggcaga

SEQ ID NO: 2579 - RNA, 19 nt, Homo sapiens
cugccacccaugcugcugg

SEQ ID NO: 2580 - RNA, 19 nt, Homo sapiens
ccagcagcauggguggcag

SEQ ID NO: 2581 - RNA, 19 nt, Homo sapiens
ugccacccaugcugcuggc

SEQ ID NO: 2582 - RNA, 19 nt, Homo sapiens
gccagcagcauggguggca

SEQ ID NO: 2583 - RNA, 19 nt, Homo sapiens
gccacccaugcugcuggcu

SEQ ID NO: 2584 - RNA, 19 nt, Homo sapiens
agccagcagcauggguggc

SEQ ID NO: 2585 - RNA, 19 nt, Homo sapiens
ccacccaugcugcuggcug

SEQ ID NO: 2586 - RNA, 19 nt, Homo sapiens
cagccagcagcaugggugg

SEQ ID NO: 2587 - RNA, 19 nt, Homo sapiens
cacccaugcugcuggcugg

SEQ ID NO: 2588 - RNA, 19 nt, Homo sapiens
ccagccagcagcaugggug

SEQ ID NO: 2589 - RNA, 19 nt, Homo sapiens
acccaugcugcuggcugga

SEQ ID NO: 2590 - RNA, 19 nt, Homo sapiens
uccagccagcagcaugggu

SEQ ID NO: 2591 - RNA, 19 nt, Homo sapiens
cccaugcugcuggcuggag

SEQ ID NO: 2592 - RNA, 19 nt, Homo sapiens
cuccagccagcagcauggg

SEQ ID NO: 2593 - RNA, 19 nt, Homo sapiens
ccaugcugcuggcuggagc

SEQ ID NO: 2594 - RNA, 19 nt, Homo sapiens
gcuccagccagcagcaugg

SEQ ID NO: 2595 - RNA, 19 nt, Homo sapiens
caugcugcuggcuggagcc

SEQ ID NO: 2596 - RNA, 19 nt, Homo sapiens
ggcuccagccagcagcaug

SEQ ID NO: 2597 - RNA, 19 nt, Homo sapiens
augcugcuggcuggagccc

SEQ ID NO: 2598 - RNA, 19 nt, Homo sapiens
gggcuccagccagcagcau

SEQ ID NO: 2599 - RNA, 19 nt, Homo sapiens
ugcugcuggcuggagcccu

SEQ ID NO: 2600 - RNA, 19 nt, Homo sapiens
agggcuccagccagcagca

SEQ ID NO: 2601 - RNA, 19 nt, Homo sapiens
gcugcuggcuggagcccug

SEQ ID NO: 2602 - RNA, 19 nt, Homo sapiens
cagggcuccagccagcagc

SEQ ID NO: 2603 - RNA, 19 nt, Homo sapiens
cugcuggcuggagcccugg

SEQ ID NO: 2604 - RNA, 19 nt, Homo sapiens
ccagggcuccagccagcag

SEQ ID NO: 2605 - RNA, 19 nt, Homo sapiens
ugcuggcuggagcccugga

SEQ ID NO: 2606 - RNA, 19 nt, Homo sapiens
uccagggcuccagccagca

SEQ ID NO: 2607 - RNA, 19 nt, Homo sapiens
gcuggcuggagcccuggag

SEQ ID NO: 2608 - RNA, 19 nt, Homo sapiens
cuccagggcuccagccagc

SEQ ID NO: 2609 - RNA, 19 nt, Homo sapiens
cuggcuggagcccuggagu

SEQ ID NO: 2610 - RNA, 19 nt, Homo sapiens
acuccagggcuccagccag

SEQ ID NO: 2611 - RNA, 19 nt, Homo sapiens
uggcuggagcccuggaguc

SEQ ID NO: 2612 - RNA, 19 nt, Homo sapiens
gacuccagggcuccagcca

SEQ ID NO: 2613 - RNA, 19 nt, Homo sapiens
ggcuggagcccuggagucu

SEQ ID NO: 2614 - RNA, 19 nt, Homo sapiens
agacuccagggcuccagcc

SEQ ID NO: 2615 - RNA, 19 nt, Homo sapiens
gcuggagcccuggagucug

SEQ ID NO: 2616 - RNA, 19 nt, Homo sapiens
cagacuccagggcuccagc

SEQ ID NO: 2617 - RNA, 19 nt, Homo sapiens
cuggagcccuggagucugu

SEQ ID NO: 2618 - RNA, 19 nt, Homo sapiens
acagacuccagggcuccag

SEQ ID NO: 2619 - RNA, 19 nt, Homo sapiens
uggagcccuggagucugug

SEQ ID NO: 2620 - RNA, 19 nt, Homo sapiens
cacagacuccagggcucca

SEQ ID NO: 2621 - RNA, 19 nt, Homo sapiens
ggagcccuggagucugugc

SEQ ID NO: 2622 - RNA, 19 nt, Homo sapiens
gcacagacuccagggcucc

SEQ ID NO: 2623 - RNA, 19 nt, Homo sapiens
gagcccuggagucugugcg

SEQ ID NO: 2624 - RNA, 19 nt, Homo sapiens
cgcacagacuccagggcuc

SEQ ID NO: 2625 - RNA, 19 nt, Homo sapiens
agcccuggagucugugcgg

SEQ ID NO: 2626 - RNA, 19 nt, Homo sapiens
ccgcacagacuccagggcu

SEQ ID NO: 2627 - RNA, 19 nt, Homo sapiens
gcccuggagucugugcgga

SEQ ID NO: 2628 - RNA, 19 nt, Homo sapiens
uccgcacagacuccagggc

SEQ ID NO: 2629 - RNA, 19 nt, Homo sapiens
ccuggagucugugcggauc

SEQ ID NO: 2630 - RNA, 19 nt, Homo sapiens
gauccgcacagacuccagg

SEQ ID NO: 2631 - RNA, 19 nt, Homo sapiens
cuggagucugugcggaucc

SEQ ID NO: 2632 - RNA, 19 nt, Homo sapiens
ggauccgcacagacuccag

SEQ ID NO: 2633 - RNA, 19 nt, Homo sapiens
ggagucugugcggauccug

SEQ ID NO: 2634 - RNA, 19 nt, Homo sapiens
caggauccgcacagacucc

SEQ ID NO: 2635 - RNA, 19 nt, Homo sapiens
gagucugugcggauccuga

SEQ ID NO: 2636 - RNA, 19 nt, Homo sapiens
ucaggauccgcacagacuc

SEQ ID NO: 2637 - RNA, 19 nt, Homo sapiens
agucugugcggauccugaa

SEQ ID NO: 2638 - RNA, 19 nt, Homo sapiens
uucaggauccgcacagacu

SEQ ID NO: 2639 - RNA, 19 nt, Homo sapiens
gucugugcggauccugaag

SEQ ID NO: 2640 - RNA, 19 nt, Homo sapiens
cuucaggauccgcacagac

SEQ ID NO: 2641 - RNA, 19 nt, Homo sapiens
ucugugcggauccugaaga

SEQ ID NO: 2642 - RNA, 19 nt, Homo sapiens
ucuucaggauccgcacaga

SEQ ID NO: 2643 - RNA, 19 nt, Homo sapiens
cugugcggauccugaagag

SEQ ID NO: 2644 - RNA, 19 nt, Homo sapiens
cucuucaggauccgcacag

SEQ ID NO: 2645 - RNA, 19 nt, Homo sapiens
ugugcggauccugaagagc

SEQ ID NO: 2646 - RNA, 19 nt, Homo sapiens
gcucuucaggauccgcaca

SEQ ID NO: 2647 - RNA, 19 nt, Homo sapiens
gugcggauccugaagagcg

SEQ ID NO: 2648 - RNA, 19 nt, Homo sapiens
cgcucuucaggauccgcac

SEQ ID NO: 2649 - RNA, 19 nt, Homo sapiens
ugcggauccugaagagcgc

SEQ ID NO: 2650 - RNA, 19 nt, Homo sapiens
gcgcucuucaggauccgca

SEQ ID NO: 2651 - RNA, 19 nt, Homo sapiens
gcggauccugaagagcgcu

SEQ ID NO: 2652 - RNA, 19 nt, Homo sapiens
agcgcucuucaggauccgc

SEQ ID NO: 2653 - RNA, 19 nt, Homo sapiens
cggauccugaagagcgcug

SEQ ID NO: 2654 - RNA, 19 nt, Homo sapiens
cagcgcucuucaggauccg

SEQ ID NO: 2655 - RNA, 19 nt, Homo sapiens
ggauccugaagagcgcuga

SEQ ID NO: 2656 - RNA, 19 nt, Homo sapiens
ucagcgcucuucaggaucc

SEQ ID NO: 2657 - RNA, 19 nt, Homo sapiens
gauccugaagagcgcugag

SEQ ID NO: 2658 - RNA, 19 nt, Homo sapiens
cucagcgcucuucaggauc

SEQ ID NO: 2659 - RNA, 19 nt, Homo sapiens
auccugaagagcgcugagg

SEQ ID NO: 2660 - RNA, 19 nt, Homo sapiens
ccucagcgcucuucaggau

SEQ ID NO: 2661 - RNA, 19 nt, Homo sapiens
uccugaagagcgcugaggg

SEQ ID NO: 2662 - RNA, 19 nt, Homo sapiens
cccucagcgcucuucagga

SEQ ID NO: 2663 - RNA, 19 nt, Homo sapiens
ccugaagagcgcugaggga

SEQ ID NO: 2664 - RNA, 19 nt, Homo sapiens
ucccucagcgcucuucagg

SEQ ID NO: 2665 - RNA, 19 nt, Homo sapiens
cugaagagcgcugagggac

SEQ ID NO: 2666 - RNA, 19 nt, Homo sapiens
gucccucagcgcucuucag

SEQ ID NO: 2667 - RNA, 19 nt, Homo sapiens
ugaagagcgcugagggacg

SEQ ID NO: 2668 - RNA, 19 nt, Homo sapiens
cgucccucagcgcucuuca

SEQ ID NO: 2669 - RNA, 19 nt, Homo sapiens
gaagagcgcugagggacgg

SEQ ID NO: 2670 - RNA, 19 nt, Homo sapiens
ccgucccucagcgcucuuc

SEQ ID NO: 2671 - RNA, 19 nt, Homo sapiens
aagagcgcugagggacggg

SEQ ID NO: 2672 - RNA, 19 nt, Homo sapiens
cccgucccucagcgcucuu

SEQ ID NO: 2673 - RNA, 19 nt, Homo sapiens
agagcgcugagggacgggu

SEQ ID NO: 2674 - RNA, 19 nt, Homo sapiens
acccgucccucagcgcucu

SEQ ID NO: 2675 - RNA, 19 nt, Homo sapiens
gagcgcugagggacgggug

SEQ ID NO: 2676 - RNA, 19 nt, Homo sapiens
cacccgucccucagcgcuc

SEQ ID NO: 2677 - RNA, 19 nt, Homo sapiens
agcgcugagggacgggugc

SEQ ID NO: 2678 - RNA, 19 nt, Homo sapiens
gcacccgucccucagcgcu

SEQ ID NO: 2679 - RNA, 19 nt, Homo sapiens
gcgcugagggacgggugcu

SEQ ID NO: 2680 - RNA, 19 nt, Homo sapiens
agcacccgucccucagcgc

SEQ ID NO: 2681 - RNA, 19 nt, Homo sapiens
cgcugagggacgggugcuu

SEQ ID NO: 2682 - RNA, 19 nt, Homo sapiens
aagcacccgucccucagcg

SEQ ID NO: 2683 - RNA, 19 nt, Homo sapiens
gcugagggacgggugcuuc

SEQ ID NO: 2684 - RNA, 19 nt, Homo sapiens
gaagcacccgucccucagc

SEQ ID NO: 2685 - RNA, 19 nt, Homo sapiens
cugagggacgggugcuucg

SEQ ID NO: 2686 - RNA, 19 nt, Homo sapiens
cgaagcacccgucccucag

SEQ ID NO: 2687 - RNA, 19 nt, Homo sapiens
ugagggacgggugcuucgc

SEQ ID NO: 2688 - RNA, 19 nt, Homo sapiens
gcgaagcacccgucccuca

SEQ ID NO: 2689 - RNA, 19 nt, Homo sapiens
gagggacgggugcuucgcc

SEQ ID NO: 2690 - RNA, 19 nt, Homo sapiens
ggcgaagcacccgucccuc

SEQ ID NO: 2691 - RNA, 19 nt, Homo sapiens
agggacgggugcuucgccg

SEQ ID NO: 2692 - RNA, 19 nt, Homo sapiens
cggcgaagcacccgucccu

SEQ ID NO: 2693 - RNA, 19 nt, Homo sapiens
gggacgggugcuucgccgc

SEQ ID NO: 2694 - RNA, 19 nt, Homo sapiens
gcggcgaagcacccguccc

SEQ ID NO: 2695 - RNA, 19 nt, Homo sapiens
ggacgggugcuucgccgcc

SEQ ID NO: 2696 - RNA, 19 nt, Homo sapiens
ggcggcgaagcacccgucc

SEQ ID NO: 2697 - RNA, 19 nt, Homo sapiens
gacgggugcuucgccgcca

SEQ ID NO: 2698 - RNA, 19 nt, Homo sapiens
uggcggcgaagcacccguc

SEQ ID NO: 2699 - RNA, 19 nt, Homo sapiens
acgggugcuucgccgccag

SEQ ID NO: 2700 - RNA, 19 nt, Homo sapiens
cuggcggcgaagcacccgu

SEQ ID NO: 2701 - RNA, 19 nt, Homo sapiens
cgggugcuucgccgccagc

SEQ ID NO: 2702 - RNA, 19 nt, Homo sapiens
gcuggcggcgaagcacccg

SEQ ID NO: 2703 - RNA, 19 nt, Homo sapiens
gggugcuucgccgccagca

SEQ ID NO: 2704 - RNA, 19 nt, Homo sapiens
ugcuggcggcgaagcaccc

SEQ ID NO: 2705 - RNA, 19 nt, Homo sapiens
ggugcuucgccgccagcac

SEQ ID NO: 2706 - RNA, 19 nt, Homo sapiens
gugcuggcggcgaagcacc

SEQ ID NO: 2707 - RNA, 19 nt, Homo sapiens
gugcuucgccgccagcacc

SEQ ID NO: 2708 - RNA, 19 nt, Homo sapiens
ggugcuggcggcgaagcac

SEQ ID NO: 2709 - RNA, 19 nt, Homo sapiens
ugcuucgccgccagcacca

SEQ ID NO: 2710 - RNA, 19 nt, Homo sapiens
uggugcuggcggcgaagca

SEQ ID NO: 2711 - RNA, 19 nt, Homo sapiens
gcuucgccgccagcaccag

SEQ ID NO: 2712 - RNA, 19 nt, Homo sapiens
cuggugcuggcggcgaagc

SEQ ID NO: 2713 - RNA, 19 nt, Homo sapiens
cuucgccgccagcaccagc

SEQ ID NO: 2714 - RNA, 19 nt, Homo sapiens
gcuggugcuggcggcgaag

SEQ ID NO: 2715 - RNA, 19 nt, Homo sapiens
uucgccgccagcaccagcg

SEQ ID NO: 2716 - RNA, 19 nt, Homo sapiens
cgcuggugcuggcggcgaa

SEQ ID NO: 2717 - RNA, 19 nt, Homo sapiens
ucgccgccagcaccagcgc

SEQ ID NO: 2718 - RNA, 19 nt, Homo sapiens
gcgcuggugcuggcggcga

SEQ ID NO: 2719 - RNA, 19 nt, Homo sapiens
cgccgccagcaccagcgca

SEQ ID NO: 2720 - RNA, 19 nt, Homo sapiens
ugcgcuggugcuggcggcg

SEQ ID NO: 2721 - RNA, 19 nt, Homo sapiens
gccgccagcaccagcgcaa

SEQ ID NO: 2722 - RNA, 19 nt, Homo sapiens
uugcgcuggugcuggcggc

SEQ ID NO: 2723 - RNA, 19 nt, Homo sapiens
ccgccagcaccagcgcaac

SEQ ID NO: 2724 - RNA, 19 nt, Homo sapiens
guugcgcuggugcuggcgg

SEQ ID NO: 2725 - RNA, 19 nt, Homo sapiens
cgccagcaccagcgcaacg

SEQ ID NO: 2726 - RNA, 19 nt, Homo sapiens
cguugcgcuggugcuggcg

SEQ ID NO: 2727 - RNA, 19 nt, Homo sapiens
gccagcaccagcgcaacgu

SEQ ID NO: 2728 - RNA, 19 nt, Homo sapiens
acguugcgcuggugcuggc

SEQ ID NO: 2729 - RNA, 19 nt, Homo sapiens
cucaugagacagaugcuaa

SEQ ID NO: 2730 - RNA, 19 nt, Homo sapiens
uuagcaucugucucaugag

SEQ ID NO: 2731 - RNA, 19 nt, Homo sapiens
ucaugagacagaugcuaau

SEQ ID NO: 2732 - RNA, 19 nt, Homo sapiens
auuagcaucugucucauga

SEQ ID NO: 2733 - RNA, 19 nt, Homo sapiens
caugagacagaugcuaaug

SEQ ID NO: 2734 - RNA, 19 nt, Homo sapiens
cauuagcaucugucucaug

SEQ ID NO: 2735 - RNA, 19 nt, Homo sapiens
augagacagaugcuaaugg

SEQ ID NO: 2736 - RNA, 19 nt, Homo sapiens
ccauuagcaucugucucau

SEQ ID NO: 2737 - RNA, 19 nt, Homo sapiens
ugagacagaugcuaaugga

SEQ ID NO: 2738 - RNA, 19 nt, Homo sapiens
uccauuagcaucugucuca

SEQ ID NO: 2739 - RNA, 19 nt, Homo sapiens
agacagaugcuaauggaug

SEQ ID NO: 2740 - RNA, 19 nt, Homo sapiens
cauccauuagcaucugucu

SEQ ID NO: 2741 - RNA, 19 nt, Homo sapiens
gacagaugcuaauggaugc

SEQ ID NO: 2742 - RNA, 19 nt, Homo sapiens
gcauccauuagcaucuguc

SEQ ID NO: 2743 - RNA, 19 nt, Homo sapiens
acagaugcuaauggaugcc

SEQ ID NO: 2744 - RNA, 19 nt, Homo sapiens
ggcauccauuagcaucugu

SEQ ID NO: 2745 - RNA, 19 nt, Homo sapiens
cagaugcuaauggaugccg

SEQ ID NO: 2746 - RNA, 19 nt, Homo sapiens
cggcauccauuagcaucug

SEQ ID NO: 2747 - RNA, 19 nt, Homo sapiens
agaugcuaauggaugccgg

SEQ ID NO: 2748 - RNA, 19 nt, Homo sapiens
ccggcauccauuagcaucu

SEQ ID NO: 2749 - RNA, 19 nt, Homo sapiens
gaugcuaauggaugccggc

SEQ ID NO: 2750 - RNA, 19 nt, Homo sapiens
gccggcauccauuagcauc

SEQ ID NO: 2751 - RNA, 19 nt, Homo sapiens
augcuaauggaugccggcc

SEQ ID NO: 2752 - RNA, 19 nt, Homo sapiens
ggccggcauccauuagcau

SEQ ID NO: 2753 - RNA, 19 nt, Homo sapiens
ugcuaauggaugccggccu

SEQ ID NO: 2754 - RNA, 19 nt, Homo sapiens
aggccggcauccauuagca

SEQ ID NO: 2755 - RNA, 19 nt, Homo sapiens
gcuaauggaugccggccuc

SEQ ID NO: 2756 - RNA, 19 nt, Homo sapiens
gaggccggcauccauuagc

SEQ ID NO: 2757 - RNA, 19 nt, Homo sapiens
cuaauggaugccggccucc

SEQ ID NO: 2758 - RNA, 19 nt, Homo sapiens
ggaggccggcauccauuag

SEQ ID NO: 2759 - RNA, 19 nt, Homo sapiens
uaauggaugccggccuccc

SEQ ID NO: 2760 - RNA, 19 nt, Homo sapiens
gggaggccggcauccauua

SEQ ID NO: 2761 - RNA, 19 nt, Homo sapiens
aauggaugccggccucccu

SEQ ID NO: 2762 - RNA, 19 nt, Homo sapiens
agggaggccggcauccauu

SEQ ID NO: 2763 - RNA, 19 nt, Homo sapiens
auggaugccggccucccug

SEQ ID NO: 2764 - RNA, 19 nt, Homo sapiens
cagggaggccggcauccau

SEQ ID NO: 2765 - RNA, 19 nt, Homo sapiens
uggaugccggccucccugu

SEQ ID NO: 2766 - RNA, 19 nt, Homo sapiens
acagggaggccggcaucca

SEQ ID NO: 2767 - RNA, 19 nt, Homo sapiens
ggaugccggccucccuguu

SEQ ID NO: 2768 - RNA, 19 nt, Homo sapiens
aacagggaggccggcaucc

SEQ ID NO: 2769 - RNA, 19 nt, Homo sapiens
gaugccggccucccuguug

SEQ ID NO: 2770 - RNA, 19 nt, Homo sapiens
caacagggaggccggcauc

SEQ ID NO: 2771 - RNA, 19 nt, Homo sapiens
augccggccucccuguugu

SEQ ID NO: 2772 - RNA, 19 nt, Homo sapiens
acaacagggaggccggcau

SEQ ID NO: 2773 - RNA, 19 nt, Homo sapiens
ugccggccucccuguuguc

SEQ ID NO: 2774 - RNA, 19 nt, Homo sapiens
gacaacagggaggccggca

SEQ ID NO: 2775 - RNA, 19 nt, Homo sapiens
gccggccucccuguugucc

SEQ ID NO: 2776 - RNA, 19 nt, Homo sapiens
ggacaacagggaggccggc

SEQ ID NO: 2777 - RNA, 19 nt, Homo sapiens
ccggccucccuguugucca

SEQ ID NO: 2778 - RNA, 19 nt, Homo sapiens
uggacaacagggaggccgg

SEQ ID NO: 2779 - RNA, 19 nt, Homo sapiens
cggccucccuguuguccac

SEQ ID NO: 2780 - RNA, 19 nt, Homo sapiens
guggacaacagggaggccg

SEQ ID NO: 2781 - RNA, 19 nt, Homo sapiens
ggccucccuguuguccacu

SEQ ID NO: 2782 - RNA, 19 nt, Homo sapiens
aguggacaacagggaggcc

SEQ ID NO: 2783 - RNA, 19 nt, Homo sapiens
gccucccuguuguccacug

SEQ ID NO: 2784 - RNA, 19 nt, Homo sapiens
caguggacaacagggaggc

SEQ ID NO: 2785 - RNA, 19 nt, Homo sapiens
ccucccuguuguccacugc

SEQ ID NO: 2786 - RNA, 19 nt, Homo sapiens
gcaguggacaacagggagg

SEQ ID NO: 2787 - RNA, 19 nt, Homo sapiens
cucccuguuguccacugcc

SEQ ID NO: 2788 - RNA, 19 nt, Homo sapiens
ggcaguggacaacagggag

SEQ ID NO: 2789 - RNA, 19 nt, Homo sapiens
ucccuguuguccacugccc

SEQ ID NO: 2790 - RNA, 19 nt, Homo sapiens
gggcaguggacaacaggga

SEQ ID NO: 2791 - RNA, 19 nt, Homo sapiens
cccuguuguccacugcccc

SEQ ID NO: 2792 - RNA, 19 nt, Homo sapiens
ggggcaguggacaacaggg

SEQ ID NO: 2793 - RNA, 19 nt, Homo sapiens
ccuguuguccacugcccca

SEQ ID NO: 2794 - RNA, 19 nt, Homo sapiens
uggggcaguggacaacagg

SEQ ID NO: 2795 - RNA, 19 nt, Homo sapiens
cuguuguccacugccccag

SEQ ID NO: 2796 - RNA, 19 nt, Homo sapiens
cuggggcaguggacaacag

SEQ ID NO: 2797 - RNA, 19 nt, Homo sapiens
uguuguccacugccccagc

SEQ ID NO: 2798 - RNA, 19 nt, Homo sapiens
gcuggggcaguggacaaca

SEQ ID NO: 2799 - RNA, 19 nt, Homo sapiens
guuguccacugccccagcc

SEQ ID NO: 2800 - RNA, 19 nt, Homo sapiens
ggcuggggcaguggacaac

SEQ ID NO: 2801 - RNA, 19 nt, Homo sapiens
uuguccacugccccagcca

SEQ ID NO: 2802 - RNA, 19 nt, Homo sapiens
uggcuggggcaguggacaa

SEQ ID NO: 2803 - RNA, 19 nt, Homo sapiens
uguccacugccccagccac

SEQ ID NO: 2804 - RNA, 19 nt, Homo sapiens
guggcuggggcaguggaca

SEQ ID NO: 2805 - RNA, 19 nt, Homo sapiens
guccacugccccagccaca

SEQ ID NO: 2806 - RNA, 19 nt, Homo sapiens
uguggcuggggcaguggac

SEQ ID NO: 2807 - RNA, 19 nt, Homo sapiens
uccacugccccagccacau

SEQ ID NO: 2808 - RNA, 19 nt, Homo sapiens
auguggcuggggcagugga

SEQ ID NO: 2809 - RNA, 19 nt, Homo sapiens
ccacugccccagccacauc

SEQ ID NO: 2810 - RNA, 19 nt, Homo sapiens
gauguggcuggggcagugg

SEQ ID NO: 2811 - RNA, 19 nt, Homo sapiens
cacugccccagccacauca

SEQ ID NO: 2812 - RNA, 19 nt, Homo sapiens
ugauguggcuggggcagug

SEQ ID NO: 2813 - RNA, 19 nt, Homo sapiens
acugccccagccacaucau

SEQ ID NO: 2814 - RNA, 19 nt, Homo sapiens
augauguggcuggggcagu

SEQ ID NO: 2815 - RNA, 19 nt, Homo sapiens
cugccccagccacaucauc

SEQ ID NO: 2816 - RNA, 19 nt, Homo sapiens
gaugauguggcuggggcag

SEQ ID NO: 2817 - RNA, 19 nt, Homo sapiens
ugccccagccacaucaucc

SEQ ID NO: 2818 - RNA, 19 nt, Homo sapiens
ggaugauguggcuggggca

SEQ ID NO: 2819 - RNA, 19 nt, Homo sapiens
gccccagccacaucauccc

SEQ ID NO: 2820 - RNA, 19 nt, Homo sapiens
gggaugauguggcuggggc

SEQ ID NO: 2821 - RNA, 19 nt, Homo sapiens
ccccagccacaucaucccu

SEQ ID NO: 2822 - RNA, 19 nt, Homo sapiens
agggaugauguggcugggg

SEQ ID NO: 2823 - RNA, 19 nt, Homo sapiens
cccagccacaucaucccug

SEQ ID NO: 2824 - RNA, 19 nt, Homo sapiens
cagggaugauguggcuggg

SEQ ID NO: 2825 - RNA, 19 nt, Homo sapiens
ccagccacaucaucccugu

SEQ ID NO: 2826 - RNA, 19 nt, Homo sapiens
acagggaugauguggcugg

SEQ ID NO: 2827 - RNA, 19 nt, Homo sapiens
cagccacaucaucccugug

SEQ ID NO: 2828 - RNA, 19 nt, Homo sapiens
cacagggaugauguggcug

SEQ ID NO: 2829 - RNA, 19 nt, Homo sapiens
agccacaucaucccugugc

SEQ ID NO: 2830 - RNA, 19 nt, Homo sapiens
gcacagggaugauguggcu

SEQ ID NO: 2831 - RNA, 19 nt, Homo sapiens
gccacaucaucccugugcg

SEQ ID NO: 2832 - RNA, 19 nt, Homo sapiens
cgcacagggaugauguggc

SEQ ID NO: 2833 - RNA, 19 nt, Homo sapiens
ccacaucaucccugugcgg

SEQ ID NO: 2834 - RNA, 19 nt, Homo sapiens
ccgcacagggaugaugugg

SEQ ID NO: 2835 - RNA, 19 nt, Homo sapiens
cacaucaucccugugcggg

SEQ ID NO: 2836 - RNA, 19 nt, Homo sapiens
cccgcacagggaugaugug

SEQ ID NO: 2837 - RNA, 19 nt, Homo sapiens
acaucaucccugugcgggu

SEQ ID NO: 2838 - RNA, 19 nt, Homo sapiens
acccgcacagggaugaugu

SEQ ID NO: 2839 - RNA, 19 nt, Homo sapiens
aucaucccugugcggguug

SEQ ID NO: 2840 - RNA, 19 nt, Homo sapiens
caacccgcacagggaugau

SEQ ID NO: 2841 - RNA, 19 nt, Homo sapiens
ucaucccugugcggguugc

SEQ ID NO: 2842 - RNA, 19 nt, Homo sapiens
gcaacccgcacagggauga

SEQ ID NO: 2843 - RNA, 19 nt, Homo sapiens
caucccugugcggguugca

SEQ ID NO: 2844 - RNA, 19 nt, Homo sapiens
ugcaacccgcacagggaug

SEQ ID NO: 2845 - RNA, 19 nt, Homo sapiens
aucccugugcggguugcag

SEQ ID NO: 2846 - RNA, 19 nt, Homo sapiens
cugcaacccgcacagggau

SEQ ID NO: 2847 - RNA, 19 nt, Homo sapiens
ucccugugcggguugcaga

SEQ ID NO: 2848 - RNA, 19 nt, Homo sapiens
ucugcaacccgcacaggga

SEQ ID NO: 2849 - RNA, 19 nt, Homo sapiens
ccugugcggguugcagaug

SEQ ID NO: 2850 - RNA, 19 nt, Homo sapiens
caucugcaacccgcacagg

SEQ ID NO: 2851 - RNA, 19 nt, Homo sapiens
cugugcggguugcagaugc

SEQ ID NO: 2852 - RNA, 19 nt, Homo sapiens
gcaucugcaacccgcacag

SEQ ID NO: 2853 - RNA, 19 nt, Homo sapiens
ugugcggguugcagaugcu

SEQ ID NO: 2854 - RNA, 19 nt, Homo sapiens
agcaucugcaacccgcaca

SEQ ID NO: 2855 - RNA, 19 nt, Homo sapiens
gugcggguugcagaugcug

SEQ ID NO: 2856 - RNA, 19 nt, Homo sapiens
cagcaucugcaacccgcac

SEQ ID NO: 2857 - RNA, 19 nt, Homo sapiens
ugcggguugcagaugcugc

SEQ ID NO: 2858 - RNA, 19 nt, Homo sapiens
gcagcaucugcaacccgca

SEQ ID NO: 2859 - RNA, 19 nt, Homo sapiens
gcggguugcagaugcugcu

SEQ ID NO: 2860 - RNA, 19 nt, Homo sapiens
agcagcaucugcaacccgc

SEQ ID NO: 2861 - RNA, 19 nt, Homo sapiens
cggguugcagaugcugcua

SEQ ID NO: 2862 - RNA, 19 nt, Homo sapiens
uagcagcaucugcaacccg

SEQ ID NO: 2863 - RNA, 19 nt, Homo sapiens
ggguugcagaugcugcuaa

SEQ ID NO: 2864 - RNA, 19 nt, Homo sapiens
uuagcagcaucugcaaccc

SEQ ID NO: 2865 - RNA, 19 nt, Homo sapiens
gguugcagaugcugcuaaa

SEQ ID NO: 2866 - RNA, 19 nt, Homo sapiens
uuuagcagcaucugcaacc

SEQ ID NO: 2867 - RNA, 19 nt, Homo sapiens
guugcagaugcugcuaaaa

SEQ ID NO: 2868 - RNA, 19 nt, Homo sapiens
uuuuagcagcaucugcaac

SEQ ID NO: 2869 - RNA, 19 nt, Homo sapiens
uugcagaugcugcuaaaaa

SEQ ID NO: 2870 - RNA, 19 nt, Homo sapiens
uuuuuagcagcaucugcaa

SEQ ID NO: 2871 - RNA, 19 nt, Homo sapiens
ugcagaugcugcuaaaaac

SEQ ID NO: 2872 - RNA, 19 nt, Homo sapiens
guuuuuagcagcaucugca

SEQ ID NO: 2873 - RNA, 19 nt, Homo sapiens
gcagaugcugcuaaaaaca

SEQ ID NO: 2874 - RNA, 19 nt, Homo sapiens
uguuuuuagcagcaucugc

SEQ ID NO: 2875 - RNA, 19 nt, Homo sapiens
cagaugcugcuaaaaacac

SEQ ID NO: 2876 - RNA, 19 nt, Homo sapiens
guguuuuuagcagcaucug

SEQ ID NO: 2877 - RNA, 19 nt, Homo sapiens
gaagucugugaugaacuaa

SEQ ID NO: 2878 - RNA, 19 nt, Homo sapiens
uuaguucaucacagacuuc

SEQ ID NO: 2879 - RNA, 19 nt, Homo sapiens
agucugugaugaacuaaug

SEQ ID NO: 2880 - RNA, 19 nt, Homo sapiens
cauuaguucaucacagacu

SEQ ID NO: 2881 - RNA, 19 nt, Homo sapiens
ucugugaugaacuaaugag

SEQ ID NO: 2882 - RNA, 19 nt, Homo sapiens
cucauuaguucaucacaga

SEQ ID NO: 2883 - RNA, 19 nt, Homo sapiens
cugugaugaacuaaugagc

SEQ ID NO: 2884 - RNA, 19 nt, Homo sapiens
gcucauuaguucaucacag

SEQ ID NO: 2885 - RNA, 19 nt, Homo sapiens
gugaugaacuaaugagcag

SEQ ID NO: 2886 - RNA, 19 nt, Homo sapiens
cugcucauuaguucaucac

SEQ ID NO: 2887 - RNA, 19 nt, Homo sapiens
ugaugaacuaaugagcaga

SEQ ID NO: 2888 - RNA, 19 nt, Homo sapiens
ucugcucauuaguucauca

SEQ ID NO: 2889 - RNA, 19 nt, Homo sapiens
gaugaacuaaugagcagac

SEQ ID NO: 2890 - RNA, 19 nt, Homo sapiens
gucugcucauuaguucauc

SEQ ID NO: 2891 - RNA, 19 nt, Homo sapiens
augaacuaaugagcagaca

SEQ ID NO: 2892 - RNA, 19 nt, Homo sapiens
ugucugcucauuaguucau

SEQ ID NO: 2893 - RNA, 19 nt, Homo sapiens
ugaacuaaugagcagacau

SEQ ID NO: 2894 - RNA, 19 nt, Homo sapiens
augucugcucauuaguuca

SEQ ID NO: 2895 - RNA, 19 nt, Homo sapiens
gaacuaaugagcagacaua

SEQ ID NO: 2896 - RNA, 19 nt, Homo sapiens
uaugucugcucauuaguuc

SEQ ID NO: 2897 - RNA, 19 nt, Homo sapiens
aacuaaugagcagacauaa

SEQ ID NO: 2898 - RNA, 19 nt, Homo sapiens
uuaugucugcucauuaguu

SEQ ID NO: 2899 - RNA, 19 nt, Homo sapiens
acuaaugagcagacauaac

SEQ ID NO: 2900 - RNA, 19 nt, Homo sapiens
guuaugucugcucauuagu

SEQ ID NO: 2901 - RNA, 19 nt, Homo sapiens
aaugagcagacauaacauc

SEQ ID NO: 2902 - RNA, 19 nt, Homo sapiens
gauguuaugucugcucauu

SEQ ID NO: 2903 - RNA, 19 nt, Homo sapiens
augagcagacauaacaucu

SEQ ID NO: 2904 - RNA, 19 nt, Homo sapiens
agauguuaugucugcucau

SEQ ID NO: 2905 - RNA, 19 nt, Homo sapiens
ugagcagacauaacaucua

SEQ ID NO: 2906 - RNA, 19 nt, Homo sapiens
uagauguuaugucugcuca

SEQ ID NO: 2907 - RNA, 19 nt, Homo sapiens
gugcaagcaaucaauuacc

SEQ ID NO: 2908 - RNA, 19 nt, Homo sapiens
gguaauugauugcuugcac

SEQ ID NO: 2909 - RNA, 19 nt, Homo sapiens
ugcaagcaaucaauuaccc

SEQ ID NO: 2910 - RNA, 19 nt, Homo sapiens
ggguaauugauugcuugca

SEQ ID NO: 2911 - RNA, 19 nt, Homo sapiens
gcaagcaaucaauuacccu

SEQ ID NO: 2912 - RNA, 19 nt, Homo sapiens
aggguaauugauugcuugc

SEQ ID NO: 2913 - RNA, 19 nt, Homo sapiens
aagcaaucaauuacccuac

SEQ ID NO: 2914 - RNA, 19 nt, Homo sapiens
guaggguaauugauugcuu

SEQ ID NO: 2915 - RNA, 19 nt, Homo sapiens
gugccccggggagaagagc

SEQ ID NO: 2916 - RNA, 19 nt, Homo sapiens
gcucuucuccccggggcac

SEQ ID NO: 2917 - RNA, 19 nt, Homo sapiens
ugccccggggagaagagcu

SEQ ID NO: 2918 - RNA, 19 nt, Homo sapiens
agcucuucuccccggggca

SEQ ID NO: 2919 - RNA, 19 nt, Homo sapiens
gccccggggagaagagcuc

SEQ ID NO: 2920 - RNA, 19 nt, Homo sapiens
gagcucuucuccccggggc

SEQ ID NO: 2921 - RNA, 19 nt, Homo sapiens
ccccggggagaagagcucc

SEQ ID NO: 2922 - RNA, 19 nt, Homo sapiens
ggagcucuucuccccgggg

SEQ ID NO: 2923 - RNA, 19 nt, Homo sapiens
cccggggagaagagcuccu

SEQ ID NO: 2924 - RNA, 19 nt, Homo sapiens
aggagcucuucuccccggg

SEQ ID NO: 2925 - RNA, 19 nt, Homo sapiens
ccggggagaagagcuccua

SEQ ID NO: 2926 - RNA, 19 nt, Homo sapiens
uaggagcucuucuccccgg

SEQ ID NO: 2927 - RNA, 19 nt, Homo sapiens
cggggagaagagcuccuac

SEQ ID NO: 2928 - RNA, 19 nt, Homo sapiens
guaggagcucuucuccccg

SEQ ID NO: 2929 - RNA, 19 nt, Homo sapiens
ggggagaagagcuccuacg

SEQ ID NO: 2930 - RNA, 19 nt, Homo sapiens
cguaggagcucuucucccc

SEQ ID NO: 2931 - RNA, 19 nt, Homo sapiens
gggagaagagcuccuacgg

SEQ ID NO: 2932 - RNA, 19 nt, Homo sapiens
ccguaggagcucuucuccc

SEQ ID NO: 2933 - RNA, 19 nt, Homo sapiens
ggagaagagcuccuacgga

SEQ ID NO: 2934 - RNA, 19 nt, Homo sapiens
uccguaggagcucuucucc

SEQ ID NO: 2935 - RNA, 19 nt, Homo sapiens
gagaagagcuccuacggau

SEQ ID NO: 2936 - RNA, 19 nt, Homo sapiens
auccguaggagcucuucuc

SEQ ID NO: 2937 - RNA, 19 nt, Homo sapiens
accccucaccacacacccc

SEQ ID NO: 2938 - RNA, 19 nt, Homo sapiens
gggguguguggugaggggu

SEQ ID NO: 2939 - RNA, 19 nt, Homo sapiens
ccccucaccacacacccca

SEQ ID NO: 2940 - RNA, 19 nt, Homo sapiens
ugggguguguggugagggg

SEQ ID NO: 2941 - RNA, 19 nt, Homo sapiens
cccucaccacacaccccag

SEQ ID NO: 2942 - RNA, 19 nt, Homo sapiens
cugggguguguggugaggg

SEQ ID NO: 2943 - RNA, 19 nt, Homo sapiens
ccucaccacacaccccaga

SEQ ID NO: 2944 - RNA, 19 nt, Homo sapiens
ucugggguguguggugagg

SEQ ID NO: 2945 - RNA, 19 nt, Homo sapiens
cucaccacacaccccagau

SEQ ID NO: 2946 - RNA, 19 nt, Homo sapiens
aucugggguguguggugag

SEQ ID NO: 2947 - RNA, 19 nt, Homo sapiens
ucaccacacaccccagaug

SEQ ID NO: 2948 - RNA, 19 nt, Homo sapiens
caucuggggugugugguga

SEQ ID NO: 2949 - RNA, 19 nt, Homo sapiens
caccacacaccccagauga

SEQ ID NO: 2950 - RNA, 19 nt, Homo sapiens
ucaucugggguguguggug

SEQ ID NO: 2951 - RNA, 19 nt, Homo sapiens
accacacaccccagaugau

SEQ ID NO: 2952 - RNA, 19 nt, Homo sapiens
aucaucugggguguguggu

SEQ ID NO: 2953 - RNA, 19 nt, Homo sapiens
ccacacaccccagaugaug

SEQ ID NO: 2954 - RNA, 19 nt, Homo sapiens
caucaucuggggugugugg

SEQ ID NO: 2955 - RNA, 19 nt, Homo sapiens
cacacaccccagaugauga

SEQ ID NO: 2956 - RNA, 19 nt, Homo sapiens
ucaucaucuggggugugug

SEQ ID NO: 2957 - RNA, 19 nt, Homo sapiens
acacaccccagaugaugaa

SEQ ID NO: 2958 - RNA, 19 nt, Homo sapiens
uucaucaucuggggugugu

SEQ ID NO: 2959 - RNA, 19 nt, Homo sapiens
cacaccccagaugaugaac

SEQ ID NO: 2960 - RNA, 19 nt, Homo sapiens
guucaucaucuggggugug

SEQ ID NO: 2961 - RNA, 19 nt, Homo sapiens
acaccccagaugaugaacu

SEQ ID NO: 2962 - RNA, 19 nt, Homo sapiens
aguucaucaucuggggugu

SEQ ID NO: 2963 - RNA, 19 nt, Homo sapiens
caccccagaugaugaacua

SEQ ID NO: 2964 - RNA, 19 nt, Homo sapiens
uaguucaucaucuggggug

SEQ ID NO: 2965 - RNA, 19 nt, Homo sapiens
accccagaugaugaacuac

SEQ ID NO: 2966 - RNA, 19 nt, Homo sapiens
guaguucaucaucuggggu

SEQ ID NO: 2967 - RNA, 19 nt, Homo sapiens
cccagaugaugaacuacuu

SEQ ID NO: 2968 - RNA, 19 nt, Homo sapiens
aaguaguucaucaucuggg

SEQ ID NO: 2969 - RNA, 19 nt, Homo sapiens
ccagaugaugaacuacuuc

SEQ ID NO: 2970 - RNA, 19 nt, Homo sapiens
gaaguaguucaucaucugg

SEQ ID NO: 2971 - RNA, 19 nt, Homo sapiens
cagaugaugaacuacuucc

SEQ ID NO: 2972 - RNA, 19 nt, Homo sapiens
ggaaguaguucaucaucug

SEQ ID NO: 2973 - RNA, 19 nt, Homo sapiens
agaugaugaacuacuuccu

SEQ ID NO: 2974 - RNA, 19 nt, Homo sapiens
aggaaguaguucaucaucu

SEQ ID NO: 2975 - RNA, 19 nt, Homo sapiens
gaugaugaacuacuuccuu

SEQ ID NO: 2976 - RNA, 19 nt, Homo sapiens
aaggaaguaguucaucauc

SEQ ID NO: 2977 - RNA, 19 nt, Homo sapiens
augaugaacuacuuccuug

SEQ ID NO: 2978 - RNA, 19 nt, Homo sapiens
caaggaaguaguucaucau

SEQ ID NO: 2979 - RNA, 19 nt, Homo sapiens
ugaugaacuacuuccuuga

SEQ ID NO: 2980 - RNA, 19 nt, Homo sapiens
ucaaggaaguaguucauca

SEQ ID NO: 2981 - RNA, 19 nt, Homo sapiens
gaugaacuacuuccuugag

SEQ ID NO: 2982 - RNA, 19 nt, Homo sapiens
cucaaggaaguaguucauc

SEQ ID NO: 2983 - RNA, 19 nt, Homo sapiens
augaacuacuuccuugaga

SEQ ID NO: 2984 - RNA, 19 nt, Homo sapiens
ucucaaggaaguaguucau

SEQ ID NO: 2985 - RNA, 19 nt, Homo sapiens
ugaacuacuuccuugagaa

SEQ ID NO: 2986 - RNA, 19 nt, Homo sapiens
uucucaaggaaguaguuca

SEQ ID NO: 2987 - RNA, 19 nt, Homo sapiens
gaacuacuuccuugagaau

SEQ ID NO: 2988 - RNA, 19 nt, Homo sapiens
auucucaaggaaguaguuc

SEQ ID NO: 2989 - RNA, 19 nt, Homo sapiens
aacuacuuccuugagaauc

SEQ ID NO: 2990 - RNA, 19 nt, Homo sapiens
gauucucaaggaaguaguu

SEQ ID NO: 2991 - RNA, 19 nt, Homo sapiens
acuacuuccuugagaaucu

SEQ ID NO: 2992 - RNA, 19 nt, Homo sapiens
agauucucaaggaaguagu

SEQ ID NO: 2993 - RNA, 19 nt, Homo sapiens
cuacuuccuugagaaucug

SEQ ID NO: 2994 - RNA, 19 nt, Homo sapiens
cagauucucaaggaaguag

SEQ ID NO: 2995 - RNA, 19 nt, Homo sapiens
uacuuccuugagaaucugc

SEQ ID NO: 2996 - RNA, 19 nt, Homo sapiens
gcagauucucaaggaagua

SEQ ID NO: 2997 - RNA, 19 nt, Homo sapiens
acuuccuugagaaucugcu

SEQ ID NO: 2998 - RNA, 19 nt, Homo sapiens
agcagauucucaaggaagu

SEQ ID NO: 2999 - RNA, 19 nt, Homo sapiens
uggaagcaaguggggcugg

SEQ ID NO: 3000 - RNA, 19 nt, Homo sapiens
ccagccccacuugcuucca

SEQ ID NO: 3001 - RNA, 19 nt, Homo sapiens
ggaagcaaguggggcugga

SEQ ID NO: 3002 - RNA, 19 nt, Homo sapiens
uccagccccacuugcuucc

SEQ ID NO: 3003 - RNA, 19 nt, Homo sapiens
gaagcaaguggggcuggaa

SEQ ID NO: 3004 - RNA, 19 nt, Homo sapiens
uuccagccccacuugcuuc

SEQ ID NO: 3005 - RNA, 19 nt, Homo sapiens
aagcaaguggggcuggaac

SEQ ID NO: 3006 - RNA, 19 nt, Homo sapiens
guuccagccccacuugcuu

SEQ ID NO: 3007 - RNA, 19 nt, Homo sapiens
agcaaguggggcuggaacu

SEQ ID NO: 3008 - RNA, 19 nt, Homo sapiens
aguuccagccccacuugcu

SEQ ID NO: 3009 - RNA, 19 nt, Homo sapiens
gcaaguggggcuggaacug

SEQ ID NO: 3010 - RNA, 19 nt, Homo sapiens
caguuccagccccacuugc

SEQ ID NO: 3011 - RNA, 19 nt, Homo sapiens
caaguggggcuggaacuga

SEQ ID NO: 3012 - RNA, 19 nt, Homo sapiens
ucaguuccagccccacuug

SEQ ID NO: 3013 - RNA, 19 nt, Homo sapiens
aaguggggcuggaacugaa

SEQ ID NO: 3014 - RNA, 19 nt, Homo sapiens
uucaguuccagccccacuu

SEQ ID NO: 3015 - RNA, 19 nt, Homo sapiens
aguggggcuggaacugaag

SEQ ID NO: 3016 - RNA, 19 nt, Homo sapiens
cuucaguuccagccccacu

SEQ ID NO: 3017 - RNA, 19 nt, Homo sapiens
guggggcuggaacugaagc

SEQ ID NO: 3018 - RNA, 19 nt, Homo sapiens
gcuucaguuccagccccac

SEQ ID NO: 3019 - RNA, 19 nt, Homo sapiens
uggggcuggaacugaagcc

SEQ ID NO: 3020 - RNA, 19 nt, Homo sapiens
ggcuucaguuccagcccca

SEQ ID NO: 3021 - RNA, 19 nt, Homo sapiens
cauuccucagcugagugca

SEQ ID NO: 3022 - RNA, 19 nt, Homo sapiens
ugcacucagcugaggaaug

SEQ ID NO: 3023 - RNA, 19 nt, Homo sapiens
auuccucagcugagugcaa

SEQ ID NO: 3024 - RNA, 19 nt, Homo sapiens
uugcacucagcugaggaau

SEQ ID NO: 3025 - RNA, 19 nt, Homo sapiens
uuccucagcugagugcaac

SEQ ID NO: 3026 - RNA, 19 nt, Homo sapiens
guugcacucagcugaggaa

SEQ ID NO: 3027 - RNA, 19 nt, Homo sapiens
uccucagcugagugcaacu

SEQ ID NO: 3028 - RNA, 19 nt, Homo sapiens
aguugcacucagcugagga

SEQ ID NO: 3029 - RNA, 19 nt, Homo sapiens
ccucagcugagugcaacuu

SEQ ID NO: 3030 - RNA, 19 nt, Homo sapiens
aaguugcacucagcugagg

SEQ ID NO: 3031 - RNA, 19 nt, Homo sapiens
cucagcugagugcaacuuc

SEQ ID NO: 3032 - RNA, 19 nt, Homo sapiens
gaaguugcacucagcugag

SEQ ID NO: 3033 - RNA, 19 nt, Homo sapiens
ucagcugagugcaacuucu

SEQ ID NO: 3034 - RNA, 19 nt, Homo sapiens
agaaguugcacucagcuga

SEQ ID NO: 3035 - RNA, 19 nt, Homo sapiens
cagcugagugcaacuucug

SEQ ID NO: 3036 - RNA, 19 nt, Homo sapiens
cagaaguugcacucagcug

SEQ ID NO: 3037 - RNA, 19 nt, Homo sapiens
agcugagugcaacuucugc

SEQ ID NO: 3038 - RNA, 19 nt, Homo sapiens
gcagaaguugcacucagcu

SEQ ID NO: 3039 - RNA, 19 nt, Homo sapiens
gcugagugcaacuucugca

SEQ ID NO: 3040 - RNA, 19 nt, Homo sapiens
ugcagaaguugcacucagc

SEQ ID NO: 3041 - RNA, 19 nt, Homo sapiens
cugagugcaacuucugcag

SEQ ID NO: 3042 - RNA, 19 nt, Homo sapiens
cugcagaaguugcacucag

SEQ ID NO: 3043 - RNA, 19 nt, Homo sapiens
ugagugcaacuucugcagg

SEQ ID NO: 3044 - RNA, 19 nt, Homo sapiens
ccugcagaaguugcacuca

SEQ ID NO: 3045 - RNA, 19 nt, Homo sapiens
gagugcaacuucugcagga

SEQ ID NO: 3046 - RNA, 19 nt, Homo sapiens
uccugcagaaguugcacuc

SEQ ID NO: 3047 - RNA, 19 nt, Homo sapiens
agugcaacuucugcaggag

SEQ ID NO: 3048 - RNA, 19 nt, Homo sapiens
cuccugcagaaguugcacu

SEQ ID NO: 3049 - RNA, 19 nt, Homo sapiens
gugcaacuucugcaggagg

SEQ ID NO: 3050 - RNA, 19 nt, Homo sapiens
ccuccugcagaaguugcac

SEQ ID NO: 3051 - RNA, 19 nt, Homo sapiens
ugcaacuucugcaggaggc

SEQ ID NO: 3052 - RNA, 19 nt, Homo sapiens
gccuccugcagaaguugca

SEQ ID NO: 3053 - RNA, 19 nt, Homo sapiens
gcaacuucugcaggaggcc

SEQ ID NO: 3054 - RNA, 19 nt, Homo sapiens
ggccuccugcagaaguugc

SEQ ID NO: 3055 - RNA, 19 nt, Homo sapiens
caacuucugcaggaggcca

SEQ ID NO: 3056 - RNA, 19 nt, Homo sapiens
uggccuccugcagaaguug

SEQ ID NO: 3057 - RNA, 19 nt, Homo sapiens
aacuucugcaggaggccac

SEQ ID NO: 3058 - RNA, 19 nt, Homo sapiens
guggccuccugcagaaguu

SEQ ID NO: 3059 - RNA, 19 nt, Homo sapiens
acuucugcaggaggccacu

SEQ ID NO: 3060 - RNA, 19 nt, Homo sapiens
aguggccuccugcagaagu

SEQ ID NO: 3061 - RNA, 19 nt, Homo sapiens
cuucugcaggaggccacug

SEQ ID NO: 3062 - RNA, 19 nt, Homo sapiens
caguggccuccugcagaag

SEQ ID NO: 3063 - RNA, 19 nt, Homo sapiens
uucugcaggaggccacugc

SEQ ID NO: 3064 - RNA, 19 nt, Homo sapiens
gcaguggccuccugcagaa

SEQ ID NO: 3065 - RNA, 19 nt, Homo sapiens
ucugcaggaggccacugca

SEQ ID NO: 3066 - RNA, 19 nt, Homo sapiens
ugcaguggccuccugcaga

SEQ ID NO: 3067 - RNA, 19 nt, Homo sapiens
cugcaggaggccacugcau

SEQ ID NO: 3068 - RNA, 19 nt, Homo sapiens
augcaguggccuccugcag

SEQ ID NO: 3069 - RNA, 19 nt, Homo sapiens
ugcaggaggccacugcauu

SEQ ID NO: 3070 - RNA, 19 nt, Homo sapiens
aaugcaguggccuccugca

SEQ ID NO: 3071 - RNA, 19 nt, Homo sapiens
gcaggaggccacugcauuu

SEQ ID NO: 3072 - RNA, 19 nt, Homo sapiens
aaaugcaguggccuccugc

SEQ ID NO: 3073 - RNA, 19 nt, Homo sapiens
caggaggccacugcauuuu

SEQ ID NO: 3074 - RNA, 19 nt, Homo sapiens
aaaaugcaguggccuccug

SEQ ID NO: 3075 - RNA, 19 nt, Homo sapiens
aggaggccacugcauuuug

SEQ ID NO: 3076 - RNA, 19 nt, Homo sapiens
caaaaugcaguggccuccu

SEQ ID NO: 3077 - RNA, 19 nt, Homo sapiens
ggaggccacugcauuuuga

SEQ ID NO: 3078 - RNA, 19 nt, Homo sapiens
ucaaaaugcaguggccucc

SEQ ID NO: 3079 - RNA, 19 nt, Homo sapiens
gaggccacugcauuuugaa

SEQ ID NO: 3080 - RNA, 19 nt, Homo sapiens
uucaaaaugcaguggccuc

SEQ ID NO: 3081 - RNA, 19 nt, Homo sapiens
aggccacugcauuuugaag

SEQ ID NO: 3082 - RNA, 19 nt, Homo sapiens
cuucaaaaugcaguggccu

SEQ ID NO: 3083 - RNA, 19 nt, Homo sapiens
ggccacugcauuuugaagu

SEQ ID NO: 3084 - RNA, 19 nt, Homo sapiens
acuucaaaaugcaguggcc

SEQ ID NO: 3085 - RNA, 19 nt, Homo sapiens
gccacugcauuuugaagug

SEQ ID NO: 3086 - RNA, 19 nt, Homo sapiens
cacuucaaaaugcaguggc

SEQ ID NO: 3087 - RNA, 19 nt, Homo sapiens
ccacugcauuuugaaguga

SEQ ID NO: 3088 - RNA, 19 nt, Homo sapiens
ucacuucaaaaugcagugg

SEQ ID NO: 3089 - RNA, 19 nt, Homo sapiens
cacugcauuuugaagugau

SEQ ID NO: 3090 - RNA, 19 nt, Homo sapiens
aucacuucaaaaugcagug

SEQ ID NO: 3091 - RNA, 19 nt, Homo sapiens
acugcauuuugaagugaug

SEQ ID NO: 3092 - RNA, 19 nt, Homo sapiens
caucacuucaaaaugcagu

SEQ ID NO: 3093 - RNA, 19 nt, Homo sapiens
cugcauuuugaagugauga

SEQ ID NO: 3094 - RNA, 19 nt, Homo sapiens
ucaucacuucaaaaugcag

SEQ ID NO: 3095 - RNA, 19 nt, Homo sapiens
ugcauuuugaagugaugag

SEQ ID NO: 3096 - RNA, 19 nt, Homo sapiens
cucaucacuucaaaaugca

SEQ ID NO: 3097 - RNA, 19 nt, Homo sapiens
gcauuuugaagugaugagu

SEQ ID NO: 3098 - RNA, 19 nt, Homo sapiens
acucaucacuucaaaaugc

SEQ ID NO: 3099 - RNA, 19 nt, Homo sapiens
cauuuugaagugaugagug

SEQ ID NO: 3100 - RNA, 19 nt, Homo sapiens
cacucaucacuucaaaaug

SEQ ID NO: 3101 - RNA, 19 nt, Homo sapiens
auuuugaagugaugaguga

SEQ ID NO: 3102 - RNA, 19 nt, Homo sapiens
ucacucaucacuucaaaau

SEQ ID NO: 3103 - RNA, 19 nt, Homo sapiens
uuuugaagugaugagugaa

SEQ ID NO: 3104 - RNA, 19 nt, Homo sapiens
uucacucaucacuucaaaa

SEQ ID NO: 3105 - RNA, 19 nt, Homo sapiens
uugaagugaugagugaaag

SEQ ID NO: 3106 - RNA, 19 nt, Homo sapiens
cuuucacucaucacuucaa

SEQ ID NO: 3107 - RNA, 19 nt, Homo sapiens
ugaagugaugagugaaaga

SEQ ID NO: 3108 - RNA, 19 nt, Homo sapiens
ucuuucacucaucacuuca

SEQ ID NO: 3109 - RNA, 19 nt, Homo sapiens
gaagugaugagugaaagag

SEQ ID NO: 3110 - RNA, 19 nt, Homo sapiens
cucuuucacucaucacuuc

SEQ ID NO: 3111 - RNA, 19 nt, Homo sapiens
aagugaugagugaaagaga

SEQ ID NO: 3112 - RNA, 19 nt, Homo sapiens
ucucuuucacucaucacuu

SEQ ID NO: 3113 - RNA, 19 nt, Homo sapiens
agugaugagugaaagagag

SEQ ID NO: 3114 - RNA, 19 nt, Homo sapiens
cucucuuucacucaucacu

SEQ ID NO: 3115 - RNA, 19 nt, Homo sapiens
gugaugagugaaagagaga

SEQ ID NO: 3116 - RNA, 19 nt, Homo sapiens
ucucucuuucacucaucac

SEQ ID NO: 3117 - RNA, 19 nt, Homo sapiens
ugaugagugaaagagagaa

SEQ ID NO: 3118 - RNA, 19 nt, Homo sapiens
uucucucuuucacucauca

SEQ ID NO: 3119 - RNA, 19 nt, Homo sapiens
gaugagugaaagagagaag

SEQ ID NO: 3120 - RNA, 19 nt, Homo sapiens
cuucucucuuucacucauc

SEQ ID NO: 3121 - RNA, 19 nt, Homo sapiens
augagugaaagagagaagu

SEQ ID NO: 3122 - RNA, 19 nt, Homo sapiens
acuucucucuuucacucau

SEQ ID NO: 3123 - RNA, 19 nt, Homo sapiens
ugagugaaagagagaaguc

SEQ ID NO: 3124 - RNA, 19 nt, Homo sapiens
gacuucucucuuucacuca

SEQ ID NO: 3125 - RNA, 19 nt, Homo sapiens
gagugaaagagagaagucc

SEQ ID NO: 3126 - RNA, 19 nt, Homo sapiens
ggacuucucucuuucacuc

SEQ ID NO: 3127 - RNA, 19 nt, Homo sapiens
agugaaagagagaaguccu

SEQ ID NO: 3128 - RNA, 19 nt, Homo sapiens
aggacuucucucuuucacu

SEQ ID NO: 3129 - RNA, 19 nt, Homo sapiens
gugaaagagagaaguccua

SEQ ID NO: 3130 - RNA, 19 nt, Homo sapiens
uaggacuucucucuuucac

SEQ ID NO: 3131 - RNA, 19 nt, Homo sapiens
ugaaagagagaaguccuau

SEQ ID NO: 3132 - RNA, 19 nt, Homo sapiens
auaggacuucucucuuuca

SEQ ID NO: 3133 - RNA, 19 nt, Homo sapiens
gaaagagagaaguccuauu

SEQ ID NO: 3134 - RNA, 19 nt, Homo sapiens
aauaggacuucucucuuuc

SEQ ID NO: 3135 - RNA, 19 nt, Homo sapiens
aaagagagaaguccuauuu

SEQ ID NO: 3136 - RNA, 19 nt, Homo sapiens
aaauaggacuucucucuuu

SEQ ID NO: 3137 - RNA, 19 nt, Homo sapiens
aagagagaaguccuauuuc

SEQ ID NO: 3138 - RNA, 19 nt, Homo sapiens
gaaauaggacuucucucuu

SEQ ID NO: 3139 - RNA, 19 nt, Homo sapiens
agagagaaguccuauuucu

SEQ ID NO: 3140 - RNA, 19 nt, Homo sapiens
agaaauaggacuucucucu

SEQ ID NO: 3141 - RNA, 19 nt, Homo sapiens
gagagaaguccuauuucuc

SEQ ID NO: 3142 - RNA, 19 nt, Homo sapiens
gagaaauaggacuucucuc

SEQ ID NO: 3143 - RNA, 19 nt, Homo sapiens
agagaaguccuauuucuca

SEQ ID NO: 3144 - RNA, 19 nt, Homo sapiens
ugagaaauaggacuucucu

SEQ ID NO: 3145 - RNA, 19 nt, Homo sapiens
gagaaguccuauuucucag

SEQ ID NO: 3146 - RNA, 19 nt, Homo sapiens
cugagaaauaggacuucuc

SEQ ID NO: 3147 - RNA, 19 nt, Homo sapiens
agaaguccuauuucucagg

SEQ ID NO: 3148 - RNA, 19 nt, Homo sapiens
ccugagaaauaggacuucu

SEQ ID NO: 3149 - RNA, 19 nt, Homo sapiens
gaaguccuauuucucaggc

SEQ ID NO: 3150 - RNA, 19 nt, Homo sapiens
gccugagaaauaggacuuc

SEQ ID NO: 3151 - RNA, 19 nt, Homo sapiens
aaguccuauuucucaggcu

SEQ ID NO: 3152 - RNA, 19 nt, Homo sapiens
agccugagaaauaggacuu

SEQ ID NO: 3153 - RNA, 19 nt, Homo sapiens
aguccuauuucucaggcuu

SEQ ID NO: 3154 - RNA, 19 nt, Homo sapiens
aagccugagaaauaggacu

SEQ ID NO: 3155 - RNA, 19 nt, Homo sapiens
guccuauuucucaggcuug

SEQ ID NO: 3156 - RNA, 19 nt, Homo sapiens
caagccugagaaauaggac

SEQ ID NO: 3157 - RNA, 19 nt, Homo sapiens
uccuauuucucaggcuuga

SEQ ID NO: 3158 - RNA, 19 nt, Homo sapiens
ucaagccugagaaauagga

SEQ ID NO: 3159 - RNA, 19 nt, Homo sapiens
ccuauuucucaggcuugag

SEQ ID NO: 3160 - RNA, 19 nt, Homo sapiens
cucaagccugagaaauagg

SEQ ID NO: 3161 - RNA, 19 nt, Homo sapiens
cuauuucucaggcuugagc

SEQ ID NO: 3162 - RNA, 19 nt, Homo sapiens
gcucaagccugagaaauag

SEQ ID NO: 3163 - RNA, 19 nt, Homo sapiens
uauuucucaggcuugagca

SEQ ID NO: 3164 - RNA, 19 nt, Homo sapiens
ugcucaagccugagaaaua

SEQ ID NO: 3165 - RNA, 19 nt, Homo sapiens
auuucucaggcuugagcaa

SEQ ID NO: 3166 - RNA, 19 nt, Homo sapiens
uugcucaagccugagaaau

SEQ ID NO: 3167 - RNA, 19 nt, Homo sapiens
uuucucaggcuugagcaag

SEQ ID NO: 3168 - RNA, 19 nt, Homo sapiens
cuugcucaagccugagaaa

SEQ ID NO: 3169 - RNA, 19 nt, Homo sapiens
uucucaggcuugagcaagu

SEQ ID NO: 3170 - RNA, 19 nt, Homo sapiens
acuugcucaagccugagaa

SEQ ID NO: 3171 - RNA, 19 nt, Homo sapiens
ucucaggcuugagcaaguu

SEQ ID NO: 3172 - RNA, 19 nt, Homo sapiens
aacuugcucaagccugaga

SEQ ID NO: 3173 - RNA, 19 nt, Homo sapiens
cucaggcuugagcaaguug

SEQ ID NO: 3174 - RNA, 19 nt, Homo sapiens
caacuugcucaagccugag

SEQ ID NO: 3175 - RNA, 19 nt, Homo sapiens
ucaggcuugagcaaguugg

SEQ ID NO: 3176 - RNA, 19 nt, Homo sapiens
ccaacuugcucaagccuga

SEQ ID NO: 3177 - RNA, 19 nt, Homo sapiens
caggcuugagcaaguuggu

SEQ ID NO: 3178 - RNA, 19 nt, Homo sapiens
accaacuugcucaagccug

SEQ ID NO: 3179 - RNA, 19 nt, Homo sapiens
gcuugagcaaguugguauc

SEQ ID NO: 3180 - RNA, 19 nt, Homo sapiens
gauaccaacuugcucaagc

SEQ ID NO: 3181 - RNA, 19 nt, Homo sapiens
uugagcaaguugguaucug

SEQ ID NO: 3182 - RNA, 19 nt, Homo sapiens
cagauaccaacuugcucaa

SEQ ID NO: 3183 - RNA, 19 nt, Homo sapiens
ugagcaaguugguaucugc

SEQ ID NO: 3184 - RNA, 19 nt, Homo sapiens
gcagauaccaacuugcuca

SEQ ID NO: 3185 - RNA, 19 nt, Homo sapiens
gagcaaguugguaucugcu

SEQ ID NO: 3186 - RNA, 19 nt, Homo sapiens
agcagauaccaacuugcuc

SEQ ID NO: 3187 - RNA, 19 nt, Homo sapiens
agcaaguugguaucugcuc

SEQ ID NO: 3188 - RNA, 19 nt, Homo sapiens
gagcagauaccaacuugcu

SEQ ID NO: 3189 - RNA, 19 nt, Homo sapiens
gcaaguugguaucugcuca

SEQ ID NO: 3190 - RNA, 19 nt, Homo sapiens
ugagcagauaccaacuugc

SEQ ID NO: 3191 - RNA, 19 nt, Homo sapiens
caaguugguaucugcucag

SEQ ID NO: 3192 - RNA, 19 nt, Homo sapiens
cugagcagauaccaacuug

SEQ ID NO: 3193 - RNA, 19 nt, Homo sapiens
aaguugguaucugcucagg

SEQ ID NO: 3194 - RNA, 19 nt, Homo sapiens
ccugagcagauaccaacuu

SEQ ID NO: 3195 - RNA, 19 nt, Homo sapiens
aguugguaucugcucaggc

SEQ ID NO: 3196 - RNA, 19 nt, Homo sapiens
gccugagcagauaccaacu

SEQ ID NO: 3197 - RNA, 19 nt, Homo sapiens
guugguaucugcucaggcc

SEQ ID NO: 3198 - RNA, 19 nt, Homo sapiens
ggccugagcagauaccaac

SEQ ID NO: 3199 - RNA, 19 nt, Homo sapiens
uugguaucugcucaggccu

SEQ ID NO: 3200 - RNA, 19 nt, Homo sapiens
aggccugagcagauaccaa

SEQ ID NO: 3201 - RNA, 19 nt, Homo sapiens
ugguaucugcucaggccug

SEQ ID NO: 3202 - RNA, 19 nt, Homo sapiens
caggccugagcagauacca

SEQ ID NO: 3203 - RNA, 19 nt, Homo sapiens
gguaucugcucaggccuga

SEQ ID NO: 3204 - RNA, 19 nt, Homo sapiens
ucaggccugagcagauacc

SEQ ID NO: 3205 - RNA, 19 nt, Homo sapiens
guaucugcucaggccugag

SEQ ID NO: 3206 - RNA, 19 nt, Homo sapiens
cucaggccugagcagauac

SEQ ID NO: 3207 - RNA, 19 nt, Homo sapiens
uaucugcucaggccugagc

SEQ ID NO: 3208 - RNA, 19 nt, Homo sapiens
gcucaggccugagcagaua

SEQ ID NO: 3209 - RNA, 19 nt, Homo sapiens
aucugcucaggccugagca

SEQ ID NO: 3210 - RNA, 19 nt, Homo sapiens
ugcucaggccugagcagau

SEQ ID NO: 3211 - RNA, 19 nt, Homo sapiens
ucugcucaggccugagcau

SEQ ID NO: 3212 - RNA, 19 nt, Homo sapiens
augcucaggccugagcaga

SEQ ID NO: 3213 - RNA, 19 nt, Homo sapiens
cugcucaggccugagcaug

SEQ ID NO: 3214 - RNA, 19 nt, Homo sapiens
caugcucaggccugagcag

SEQ ID NO: 3215 - RNA, 19 nt, Homo sapiens
ugcucaggccugagcauga

SEQ ID NO: 3216 - RNA, 19 nt, Homo sapiens
ucaugcucaggccugagca

SEQ ID NO: 3217 - RNA, 19 nt, Homo sapiens
gcucaggccugagcaugac

SEQ ID NO: 3218 - RNA, 19 nt, Homo sapiens
gucaugcucaggccugagc

SEQ ID NO: 3219 - RNA, 19 nt, Homo sapiens
cucaggccugagcaugacc

SEQ ID NO: 3220 - RNA, 19 nt, Homo sapiens
ggucaugcucaggccugag

SEQ ID NO: 3221 - RNA, 19 nt, Homo sapiens
ucaggccugagcaugaccu

SEQ ID NO: 3222 - RNA, 19 nt, Homo sapiens
aggucaugcucaggccuga

SEQ ID NO: 3223 - RNA, 19 nt, Homo sapiens
caggccugagcaugaccuc

SEQ ID NO: 3224 - RNA, 19 nt, Homo sapiens
gaggucaugcucaggccug

SEQ ID NO: 3225 - RNA, 19 nt, Homo sapiens
aggccugagcaugaccuca

SEQ ID NO: 3226 - RNA, 19 nt, Homo sapiens
ugaggucaugcucaggccu

SEQ ID NO: 3227 - RNA, 19 nt, Homo sapiens
cacuuaaccccaggccauu

SEQ ID NO: 3228 - RNA, 19 nt, Homo sapiens
aauggccugggguuaagug

SEQ ID NO: 3229 - RNA, 19 nt, Homo sapiens
acuuaaccccaggccauua

SEQ ID NO: 3230 - RNA, 19 nt, Homo sapiens
uaauggccugggguuaagu

SEQ ID NO: 3231 - RNA, 19 nt, Homo sapiens
cuuaaccccaggccauuau

SEQ ID NO: 3232 - RNA, 19 nt, Homo sapiens
auaauggccugggguuaag

SEQ ID NO: 3233 - RNA, 19 nt, Homo sapiens
uuaaccccaggccauuauc

SEQ ID NO: 3234 - RNA, 19 nt, Homo sapiens
gauaauggccugggguuaa

SEQ ID NO: 3235 - RNA, 19 nt, Homo sapiens
uaaccccaggccauuauca

SEQ ID NO: 3236 - RNA, 19 nt, Homo sapiens
ugauaauggccugggguua

SEQ ID NO: 3237 - RNA, 19 nt, Homo sapiens
aaccccaggccauuaucau

SEQ ID NO: 3238 - RNA, 19 nt, Homo sapiens
augauaauggccugggguu

SEQ ID NO: 3239 - RNA, 19 nt, Homo sapiens
accccaggccauuaucaua

SEQ ID NO: 3240 - RNA, 19 nt, Homo sapiens
uaugauaauggccuggggu

SEQ ID NO: 3241 - RNA, 19 nt, Homo sapiens
cccaggccauuaucauauc

SEQ ID NO: 3242 - RNA, 19 nt, Homo sapiens
gauaugauaauggccuggg

SEQ ID NO: 3243 - RNA, 19 nt, Homo sapiens
ccaggccauuaucauaucc

SEQ ID NO: 3244 - RNA, 19 nt, Homo sapiens
ggauaugauaauggccugg

SEQ ID NO: 3245 - RNA, 19 nt, Homo sapiens
caggccauuaucauaucca

SEQ ID NO: 3246 - RNA, 19 nt, Homo sapiens
uggauaugauaauggccug

SEQ ID NO: 3247 - RNA, 19 nt, Homo sapiens
aggccauuaucauauccag

SEQ ID NO: 3248 - RNA, 19 nt, Homo sapiens
cuggauaugauaauggccu

SEQ ID NO: 3249 - RNA, 19 nt, Homo sapiens
ggccauuaucauauccaga

SEQ ID NO: 3250 - RNA, 19 nt, Homo sapiens
ucuggauaugauaauggcc

SEQ ID NO: 3251 - RNA, 19 nt, Homo sapiens
gccauuaucauauccagau

SEQ ID NO: 3252 - RNA, 19 nt, Homo sapiens
aucuggauaugauaauggc

SEQ ID NO: 3253 - RNA, 19 nt, Homo sapiens
cuucagaguugucuuuaua

SEQ ID NO: 3254 - RNA, 19 nt, Homo sapiens
uauaaagacaacucugaag

SEQ ID NO: 3255 - RNA, 19 nt, Homo sapiens
uucagaguugucuuuauau

SEQ ID NO: 3256 - RNA, 19 nt, Homo sapiens
auauaaagacaacucugaa

SEQ ID NO: 3257 - RNA, 19 nt, Homo sapiens
ucagaguugucuuuauaug

SEQ ID NO: 3258 - RNA, 19 nt, Homo sapiens
cauauaaagacaacucuga

SEQ ID NO: 3259 - RNA, 19 nt, Homo sapiens
agaguugucuuuauaugug

SEQ ID NO: 3260 - RNA, 19 nt, Homo sapiens
cacauauaaagacaacucu

SEQ ID NO: 3261 - RNA, 19 nt, Homo sapiens
uugucuuuauaugugaauu

SEQ ID NO: 3262 - RNA, 19 nt, Homo sapiens
aauucacauauaaagacaa

SEQ ID NO: 3263 - RNA, 19 nt, Homo sapiens
ugucuuuauaugugaauua

SEQ ID NO: 3264 - RNA, 19 nt, Homo sapiens
uaauucacauauaaagaca

SEQ ID NO: 3265 - RNA, 19 nt, Homo sapiens
gucuuuauaugugaauuaa

SEQ ID NO: 3266 - RNA, 19 nt, Homo sapiens
uuaauucacauauaaagac

SEQ ID NO: 3267 - RNA, 19 nt, Homo sapiens
ucuuuauaugugaauuaag

SEQ ID NO: 3268 - RNA, 19 nt, Homo sapiens
cuuaauucacauauaaaga

SEQ ID NO: 3269 - RNA, 19 nt, Homo sapiens
cuuuauaugugaauuaagu

SEQ ID NO: 3270 - RNA, 19 nt, Homo sapiens
acuuaauucacauauaaag

SEQ ID NO: 3271 - RNA, 19 nt, Homo sapiens
uuuauaugugaauuaaguu

SEQ ID NO: 3272 - RNA, 19 nt, Homo sapiens
aacuuaauucacauauaaa

SEQ ID NO: 3273 - RNA, 19 nt, Homo sapiens
uuauaugugaauuaaguua

SEQ ID NO: 3274 - RNA, 19 nt, Homo sapiens
uaacuuaauucacauauaa

SEQ ID NO: 3275 - RNA, 19 nt, Homo sapiens
uauaugugaauuaaguuau

SEQ ID NO: 3276 - RNA, 19 nt, Homo sapiens
auaacuuaauucacauaua

SEQ ID NO: 3277 - RNA, 19 nt, Homo sapiens
auaugugaauuaaguuaua

SEQ ID NO: 3278 - RNA, 19 nt, Homo sapiens
uauaacuuaauucacauau

SEQ ID NO: 3279 - RNA, 19 nt, Homo sapiens
uaugugaauuaaguuauau

SEQ ID NO: 3280 - RNA, 19 nt, Homo sapiens
auauaacuuaauucacaua

SEQ ID NO: 3281 - RNA, 19 nt, Homo sapiens
augugaauuaaguuauauu

SEQ ID NO: 3282 - RNA, 19 nt, Homo sapiens
aauauaacuuaauucacau

SEQ ID NO: 3283 - RNA, 19 nt, Homo sapiens
ugugaauuaaguuauauua

SEQ ID NO: 3284 - RNA, 19 nt, Homo sapiens
uaauauaacuuaauucaca

SEQ ID NO: 3285 - RNA, 19 nt, Homo sapiens
gugaauuaaguuauauuaa

SEQ ID NO: 3286 - RNA, 19 nt, Homo sapiens
uuaauauaacuuaauucac

SEQ ID NO: 3287 - RNA, 19 nt, Homo sapiens
ugaauuaaguuauauuaaa

SEQ ID NO: 3288 - RNA, 19 nt, Homo sapiens
uuuaauauaacuuaauuca

SEQ ID NO: 3289 - RNA, 19 nt, Homo sapiens
gaauuaaguuauauuaaau

SEQ ID NO: 3290 - RNA, 19 nt, Homo sapiens
auuuaauauaacuuaauuc

SEQ ID NO: 3291 - RNA, 19 nt, Homo sapiens
aauuaaguuauauuaaauu

SEQ ID NO: 3292 - RNA, 19 nt, Homo sapiens
aauuuaauauaacuuaauu

SEQ ID NO: 3293 - RNA, 19 nt, Homo sapiens
auuaaguuauauuaaauuu

SEQ ID NO: 3294 - RNA, 19 nt, Homo sapiens
aaauuuaauauaacuuaau

SEQ ID NO: 3295 - RNA, 19 nt, Homo sapiens
uuaaguuauauuaaauuuu

SEQ ID NO: 3296 - RNA, 19 nt, Homo sapiens
aaaauuuaauauaacuuaa

SEQ ID NO: 3297 - RNA, 19 nt, Homo sapiens
uaaguuauauuaaauuuua

SEQ ID NO: 3298 - RNA, 19 nt, Homo sapiens
uaaaauuuaauauaacuua

SEQ ID NO: 3299 - RNA, 19 nt, Homo sapiens
aaguuauauuaaauuuuaa

SEQ ID NO: 3300 - RNA, 19 nt, Homo sapiens
uuaaaauuuaauauaacuu

SEQ ID NO: 3301 - RNA, 19 nt, Homo sapiens
aguuauauuaaauuuuaau

SEQ ID NO: 3302 - RNA, 19 nt, Homo sapiens
auuaaaauuuaauauaacu

SEQ ID NO: 3303 - RNA, 19 nt, Homo sapiens
guuauauuaaauuuuaauc

SEQ ID NO: 3304 - RNA, 19 nt, Homo sapiens
gauuaaaauuuaauauaac

SEQ ID NO: 3305 - RNA, 19 nt, Homo sapiens
uauauuaaauuuuaaucua

SEQ ID NO: 3306 - RNA, 19 nt, Homo sapiens
uagauuaaaauuuaauaua

SEQ ID NO: 3307 - RNA, 19 nt, Homo sapiens
auauuaaauuuuaaucuau

SEQ ID NO: 3308 - RNA, 19 nt, Homo sapiens
auagauuaaaauuuaauau

SEQ ID NO: 3309 - RNA, 19 nt, Homo sapiens
uauuaaauuuuaaucuaua

SEQ ID NO: 3310 - RNA, 19 nt, Homo sapiens
uauagauuaaaauuuaaua

SEQ ID NO: 3311 - RNA, 19 nt, Homo sapiens
auuaaauuuuaaucuauag

SEQ ID NO: 3312 - RNA, 19 nt, Homo sapiens
cuauagauuaaaauuuaau

SEQ ID NO: 3313 - RNA, 19 nt, Homo sapiens
uuaaauuuuaaucuauagu

SEQ ID NO: 3314 - RNA, 19 nt, Homo sapiens
acuauagauuaaaauuuaa

SEQ ID NO: 3315 - RNA, 19 nt, Homo sapiens
uaaauuuuaaucuauagua

SEQ ID NO: 3316 - RNA, 19 nt, Homo sapiens
uacuauagauuaaaauuua

SEQ ID NO: 3317 - RNA, 19 nt, Homo sapiens
aaauuuuaaucuauaguaa

SEQ ID NO: 3318 - RNA, 19 nt, Homo sapiens
uuacuauagauuaaaauuu

SEQ ID NO: 3319 - RNA, 19 nt, Homo sapiens
uuuuaaucuauaguaaaaa

SEQ ID NO: 3320 - RNA, 19 nt, Homo sapiens
uuuuuacuauagauuaaaa

SEQ ID NO: 3321 - RNA, 19 nt, Homo sapiens
uuuaaucuauaguaaaaac

SEQ ID NO: 3322 - RNA, 19 nt, Homo sapiens
guuuuuacuauagauuaaa

SEQ ID NO: 3323 - RNA, 19 nt, Homo sapiens
uuaaucuauaguaaaaaca

SEQ ID NO: 3324 - RNA, 19 nt, Homo sapiens
uguuuuuacuauagauuaa

SEQ ID NO: 3325 - RNA, 19 nt, Homo sapiens
uaaucuauaguaaaaacau

SEQ ID NO: 3326 - RNA, 19 nt, Homo sapiens
auguuuuuacuauagauua

SEQ ID NO: 3327 - RNA, 19 nt, Homo sapiens
aaucuauaguaaaaacaua

SEQ ID NO: 3328 - RNA, 19 nt, Homo sapiens
uauguuuuuacuauagauu

SEQ ID NO: 3329 - RNA, 19 nt, Homo sapiens
aucuauaguaaaaacauag

SEQ ID NO: 3330 - RNA, 19 nt, Homo sapiens
cuauguuuuuacuauagau

SEQ ID NO: 3331 - RNA, 19 nt, Homo sapiens
ucuauaguaaaaacauagu

SEQ ID NO: 3332 - RNA, 19 nt, Homo sapiens
acuauguuuuuacuauaga

SEQ ID NO: 3333 - RNA, 19 nt, Homo sapiens
cuauaguaaaaacauaguc

SEQ ID NO: 3334 - RNA, 19 nt, Homo sapiens
gacuauguuuuuacuauag

SEQ ID NO: 3335 - RNA, 19 nt, Homo sapiens
uauaguaaaaacauagucc

SEQ ID NO: 3336 - RNA, 19 nt, Homo sapiens
ggacuauguuuuuacuaua

SEQ ID NO: 3337 - RNA, 19 nt, Homo sapiens
auaguaaaaacauaguccu

SEQ ID NO: 3338 - RNA, 19 nt, Homo sapiens
aggacuauguuuuuacuau

SEQ ID NO: 3339 - RNA, 19 nt, Homo sapiens
uaguaaaaacauaguccug

SEQ ID NO: 3340 - RNA, 19 nt, Homo sapiens
caggacuauguuuuuacua

SEQ ID NO: 3341 - RNA, 19 nt, Homo sapiens
aguaaaaacauaguccugg

SEQ ID NO: 3342 - RNA, 19 nt, Homo sapiens
ccaggacuauguuuuuacu

SEQ ID NO: 3343 - RNA, 19 nt, Homo sapiens
guaaaaacauaguccugga

SEQ ID NO: 3344 - RNA, 19 nt, Homo sapiens
uccaggacuauguuuuuac

SEQ ID NO: 3345 - RNA, 19 nt, Homo sapiens
uaaaaacauaguccuggaa

SEQ ID NO: 3346 - RNA, 19 nt, Homo sapiens
uuccaggacuauguuuuua

SEQ ID NO: 3347 - RNA, 19 nt, Homo sapiens
aaaaacauaguccuggaaa

SEQ ID NO: 3348 - RNA, 19 nt, Homo sapiens
uuuccaggacuauguuuuu

SEQ ID NO: 3349 - RNA, 19 nt, Homo sapiens
aaaacauaguccuggaaau

SEQ ID NO: 3350 - RNA, 19 nt, Homo sapiens
auuuccaggacuauguuuu

SEQ ID NO: 3351 - RNA, 19 nt, Homo sapiens
aaacauaguccuggaaaua

SEQ ID NO: 3352 - RNA, 19 nt, Homo sapiens
uauuuccaggacuauguuu

SEQ ID NO: 3353 - RNA, 19 nt, Homo sapiens
aacauaguccuggaaauaa

SEQ ID NO: 3354 - RNA, 19 nt, Homo sapiens
uuauuuccaggacuauguu

SEQ ID NO: 3355 - RNA, 19 nt, Homo sapiens
acauaguccuggaaauaaa

SEQ ID NO: 3356 - RNA, 19 nt, Homo sapiens
uuuauuuccaggacuaugu

SEQ ID NO: 3357 - RNA, 19 nt, Homo sapiens
cauaguccuggaaauaaau

SEQ ID NO: 3358 - RNA, 19 nt, Homo sapiens
auuuauuuccaggacuaug

SEQ ID NO: 3359 - RNA, 19 nt, Homo sapiens
auaguccuggaaauaaauu

SEQ ID NO: 3360 - RNA, 19 nt, Homo sapiens
aauuuauuuccaggacuau

SEQ ID NO: 3361 - RNA, 19 nt, Homo sapiens
uaguccuggaaauaaauuc

SEQ ID NO: 3362 - RNA, 19 nt, Homo sapiens
gaauuuauuuccaggacua

SEQ ID NO: 3363 - RNA, 19 nt, Homo sapiens
guccuggaaauaaauucuu

SEQ ID NO: 3364 - RNA, 19 nt, Homo sapiens
aagaauuuauuuccaggac

SEQ ID NO: 3365 - RNA, 19 nt, Homo sapiens
uccuggaaauaaauucuug

SEQ ID NO: 3366 - RNA, 19 nt, Homo sapiens
caagaauuuauuuccagga

SEQ ID NO: 3367 - protein, 16 aa, Artificial Sequence
  source: /note="Description of Artificial Sequence: Synthetic peptide"
AAVALLPAVLLALLAP

SEQ ID NO: 3368 - protein, 11 aa, Artificial Sequence
  source: /note="Description of Artificial Sequence: Synthetic peptide"
AALLPVLLAAP

SEQ ID NO: 3369 - protein, 13 aa, Human immunodeficiency virus 1
GRKKRRQRRRPPQ

SEQ ID NO: 3370 - protein, 16 aa, Drosophila sp.
RQIKIWFQNRRMKWKK

SEQ ID NO: 3371 - RNA, 21 nt, Artificial Sequence
  source: /note="Description of Artificial Sequence: Synthetic oligonucleotide"
caugccaaaaauggacaucau

SEQ ID NO: 3372 - RNA, 23 nt, Artificial Sequence
  source: /note="Description of Artificial Sequence: Synthetic oligonucleotide"
augauguccauuuuuggcaugac

SEQ ID NO: 3373 - RNA, 21 nt, Artificial Sequence
  source: /note="Description of Artificial Sequence: Synthetic oligonucleotide"
auuuugaagugaugagugaaa

SEQ ID NO: 3374 - RNA, 23 nt, Artificial Sequence
  source: /note="Description of Artificial Sequence: Synthetic oligonucleotide"
uuucacucaucacuucaaaaugc

SEQ ID NO: 3375 - RNA, 21 nt, Artificial Sequence
  source: /note="Description of Artificial Sequence: Synthetic oligonucleotide"
aguuauauuaaauuuuaaucu

SEQ ID NO: 3376 - RNA, 23 nt, Artificial Sequence
  source: /note="Description of Artificial Sequence: Synthetic oligonucleotide"
agauuaaaauuuaauauaacuua

SEQ ID NO: 3377 - RNA, 21 nt, Artificial Sequence
  source: /note="Description of Artificial Sequence: Synthetic oligonucleotide"
gcauuuugaagugaugaguga

SEQ ID NO: 3378 - RNA, 23 nt, Artificial Sequence
  source: /note="Description of Artificial Sequence: Synthetic oligonucleotide"
ucacucaucacuucaaaaugcag

SEQ ID NO: 3379 - RNA, 21 nt, Artificial Sequence
  source: /note="Description of Artificial Sequence: Synthetic oligonucleotide"
gaacuaaugagcagacauaac

SEQ ID NO: 3380 - RNA, 23 nt, Artificial Sequence
  source: /note="Description of Artificial Sequence: Synthetic oligonucleotide"
guuaugucugcucauuaguucau

SEQ ID NO: 3381 - RNA, 21 nt, Artificial Sequence
  source: /note="Description of Artificial Sequence: Synthetic oligonucleotide"
aaugaccacaccuaucgaguu

SEQ ID NO: 3382 - RNA, 23 nt, Artificial Sequence
  source: /note="Description of Artificial Sequence: Synthetic oligonucleotide"
aacucgauagguguggucauucu

SEQ ID NO: 3383 - RNA, 21 nt, Artificial Sequence
  source: /note="Description of Artificial Sequence: Synthetic oligonucleotide"
uaaauuuuaaucuauaguaaa

SEQ ID NO: 3384 - RNA, 23 nt, Artificial Sequence
  source: /note="Description of Artificial Sequence: Synthetic oligonucleotide"
uuuacuauagauuaaaauuuaau

SEQ ID NO: 3385 - RNA, 21 nt, Artificial Sequence
  source: /note="Description of Artificial Sequence: Synthetic oligonucleotide"
uucaguaugaucguuucuuug

SEQ ID NO: 3386 - RNA, 23 nt, Artificial Sequence
  source: /note="Description of Artificial Sequence: Synthetic oligonucleotide"
caaagaaacgaucauacugaaaa

SEQ ID NO: 3387 - RNA, 21 nt, Artificial Sequence
  source: /note="Description of Artificial Sequence: Synthetic oligonucleotide"
cacuuuucaguaugaucguuu

SEQ ID NO: 3388 - RNA, 23 nt, Artificial Sequence
  source: /note="Description of Artificial Sequence: Synthetic oligonucleotide"
aaacgaucauacugaaaagugga

SEQ ID NO: 3389 - RNA, 21 nt, Artificial Sequence
  source: /note="Description of Artificial Sequence: Synthetic oligonucleotide"
aaaucuguuuccacuuuucag

SEQ ID NO: 3390 - RNA, 23 nt, Artificial Sequence
  source: /note="Description of Artificial Sequence: Synthetic oligonucleotide"
cugaaaaguggaaacagauuuug

SEQ ID NO: 3391 - RNA, 21 nt, Artificial Sequence
  source: /note="Description of Artificial Sequence: Synthetic oligonucleotide"
cauuugaaacuguccauucaa

SEQ ID NO: 3392 - RNA, 23 nt, Artificial Sequence
  source: /note="Description of Artificial Sequence: Synthetic oligonucleotide"
uugaauggacaguuucaaaugcc

SEQ ID NO: 3393 - RNA, 21 nt, Artificial Sequence
  source: /note="Description of Artificial Sequence: Synthetic oligonucleotide"
ccuaucgaguuuuuaaaacug

SEQ ID NO: 3394 - RNA, 23 nt, Artificial Sequence
  source: /note="Description of Artificial Sequence: Synthetic oligonucleotide"
caguuuuaaaaacucgauaggug

SEQ ID NO: 3395 - RNA, 21 nt, Artificial Sequence
  source: /note="Description of Artificial Sequence: Synthetic oligonucleotide"
gaccagaaagagugucucauc

SEQ ID NO: 3396 - RNA, 23 nt, Artificial Sequence
  source: /note="Description of Artificial Sequence: Synthetic oligonucleotide"
gaugagacacucuuucuggucuu

SEQ ID NO: 3397 - RNA, 21 nt, Artificial Sequence
  source: /note="Description of Artificial Sequence: Synthetic oligonucleotide"
accagaaagagugucucaucu

SEQ ID NO: 3398 - RNA, 23 nt, Artificial Sequence
  source: /note="Description of Artificial Sequence: Synthetic oligonucleotide"
agaugagacacucuuucuggucu

SEQ ID NO: 3399 - RNA, 21 nt, Artificial Sequence
  source: /note="Description of Artificial Sequence: Synthetic oligonucleotide"
acuaaugagcagacauaacau

SEQ ID NO: 3400 - RNA, 23 nt, Artificial Sequence
  source: /note="Description of Artificial Sequence: Synthetic oligonucleotide"
auguuaugucugcucauuaguuc

SEQ ID NO: 3401 - RNA, 21 nt, Artificial Sequence
  source: /note="Description of Artificial Sequence: Synthetic oligonucleotide"
uaguaaaaacauaguccugga

SEQ ID NO: 3402 - RNA, 23 nt, Artificial Sequence
  source: /note="Description of Artificial Sequence: Synthetic oligonucleotide"
uccaggacuauguuuuuacuaua

SEQ ID NO: 3403 - RNA, 21 nt, Artificial Sequence
  source: /note="Description of Artificial Sequence: Synthetic oligonucleotide"
uauuucuggaacuaguaaauu

SEQ ID NO: 3404 - RNA, 23 nt, Artificial Sequence
  source: /note="Description of Artificial Sequence: Synthetic oligonucleotide"
aauuuacuaguuccagaaauauu

SEQ ID NO: 3405 - RNA, 21 nt, Artificial Sequence
  source: /note="Description of Artificial Sequence: Synthetic oligonucleotide"
uucugcaaagccagucuugag

SEQ ID NO: 3406 - RNA, 23 nt, Artificial Sequence
  source: /note="Description of Artificial Sequence: Synthetic oligonucleotide"
cucaagacuggcuuugcagaaga

SEQ ID NO: 3407 - RNA, 21 nt, Artificial Sequence
  source: /note="Description of Artificial Sequence: Synthetic oligonucleotide"
gaggaaagagguugcugaaac

SEQ ID NO: 3408 - RNA, 23 nt, Artificial Sequence
  source: /note="Description of Artificial Sequence: Synthetic oligonucleotide"
guuucagcaaccucuuuccucac

SEQ ID NO: 3409 - RNA, 21 nt, Artificial Sequence
  source: /note="Description of Artificial Sequence: Synthetic oligonucleotide"
gguacuagaaauauuucugga

SEQ ID NO: 3410 - RNA, 23 nt, Artificial Sequence
  source: /note="Description of Artificial Sequence: Synthetic oligonucleotide"
uccagaaauauuucuaguaccac

SEQ ID NO: 3411 - RNA, 21 nt, Artificial Sequence
  source: /note="Description of Artificial Sequence: Synthetic oligonucleotide"
gacaucaugcaaaagcaaaga

SEQ ID NO: 3412 - RNA, 23 nt, Artificial Sequence
  source: /note="Description of Artificial Sequence: Synthetic oligonucleotide"
ucuuugcuuuugcaugauguccu

SEQ ID NO: 3413 - RNA, 21 nt, Artificial Sequence
  source: /note="Description of Artificial Sequence: Synthetic oligonucleotide"
aaauuuuaaucuauaguaaaa

SEQ ID NO: 3414 - RNA, 23 nt, Artificial Sequence
  source: /note="Description of Artificial Sequence: Synthetic oligonucleotide"
uuuuacuauagauuaaaauuuaa

SEQ ID NO: 3415 - RNA, 21 nt, Artificial Sequence
  source: /note="Description of Artificial Sequence: Synthetic oligonucleotide"
caugauccaagggauucgaaa

SEQ ID NO: 3416 - RNA, 23 nt, Artificial Sequence
  source: /note="Description of Artificial Sequence: Synthetic oligonucleotide"
uuucgaaucccuuggaucaugga

SEQ ID NO: 3417 - RNA, 21 nt, Artificial Sequence
  source: /note="Description of Artificial Sequence: Synthetic oligonucleotide"
agaccagaaagagugucucau

SEQ ID NO: 3418 - RNA, 23 nt, Artificial Sequence
  source: /note="Description of Artificial Sequence: Synthetic oligonucleotide"
augagacacucuuucuggucuuu

SEQ ID NO: 3419 - RNA, 21 nt, Artificial Sequence
  source: /note="Description of Artificial Sequence: Synthetic oligonucleotide"
auccugaagagcgcugaggga

SEQ ID NO: 3420 - RNA, 23 nt, Artificial Sequence
  source: /note="Description of Artificial Sequence: Synthetic oligonucleotide"
ucccucagcgcucuucaggaucc

SEQ ID NO: 3421 - RNA, 21 nt, Artificial Sequence
  source: /note="Description of Artificial Sequence: Synthetic oligonucleotide"
gucugugaugaacuaaugagc

SEQ ID NO: 3422 - RNA, 23 nt, Artificial Sequence
  source: /note="Description of Artificial Sequence: Synthetic oligonucleotide"
gcucauuaguucaucacagacuu

SEQ ID NO: 3423 - RNA, 21 nt, Artificial Sequence
  source: /note="Description of Artificial Sequence: Synthetic oligonucleotide"
cagaaagagugucucaucuuc

SEQ ID NO: 3424 - RNA, 23 nt, Artificial Sequence
  source: /note="Description of Artificial Sequence: Synthetic oligonucleotide"
gaagaugagacacucuuucuggu

SEQ ID NO: 3425 - RNA, 21 nt, Artificial Sequence
  source: /note="Description of Artificial Sequence: Synthetic oligonucleotide"
acuuuucaguaugaucguuuc

SEQ ID NO: 3426 - RNA, 23 nt, Artificial Sequence
  source: /note="Description of Artificial Sequence: Synthetic oligonucleotide"
gaaacgaucauacugaaaagugg

SEQ ID NO: 3427 - RNA, 21 nt, Artificial Sequence
  source: /note="Description of Artificial Sequence: Synthetic oligonucleotide"
ucaugccaaaaauggacauca

SEQ ID NO: 3428 - RNA, 23 nt, Artificial Sequence
  source: /note="Description of Artificial Sequence: Synthetic oligonucleotide"
ugauguccauuuuuggcaugacu

SEQ ID NO: 3429 - RNA, 21 nt, Artificial Sequence
  source: /note="Description of Artificial Sequence: Synthetic oligonucleotide"
aauauuucuggaacuaguaaa

SEQ ID NO: 3430 - RNA, 23 nt, Artificial Sequence
  source: /note="Description of Artificial Sequence: Synthetic oligonucleotide"
uuuacuaguuccagaaauauuuc

SEQ ID NO: 3431 - RNA, 21 nt, Artificial Sequence
  source: /note="Description of Artificial Sequence: Synthetic oligonucleotide"
cuucuucaagauaacuugcca

SEQ ID NO: 3432 - RNA, 23 nt, Artificial Sequence
  source: /note="Description of Artificial Sequence: Synthetic oligonucleotide"
uggcaaguuaucuugaagaagau

SEQ ID NO: 3433 - RNA, 21 nt, Artificial Sequence
  source: /note="Description of Artificial Sequence: Synthetic oligonucleotide"
uuucaguaugaucguuucuuu

SEQ ID NO: 3434 - RNA, 23 nt, Artificial Sequence
  source: /note="Description of Artificial Sequence: Synthetic oligonucleotide"
aaagaaacgaucauacugaaaag

SEQ ID NO: 3435 - RNA, 21 nt, Artificial Sequence
  source: /note="Description of Artificial Sequence: Synthetic oligonucleotide"
cccagugugguuagugugaaa

SEQ ID NO: 3436 - RNA, 23 nt, Artificial Sequence
  source: /note="Description of Artificial Sequence: Synthetic oligonucleotide"
uuucacacuaaccacacuggggc

SEQ ID NO: 3437 - RNA, 21 nt, Artificial Sequence
  source: /note="Description of Artificial Sequence: Synthetic oligonucleotide"
gcugugagauuuacucugauu

SEQ ID NO: 3438 - RNA, 23 nt, Artificial Sequence
  source: /note="Description of Artificial Sequence: Synthetic oligonucleotide"
aaucagaguaaaucucacagccu

SEQ ID NO: 3439 - RNA, 21 nt, Artificial Sequence
  source: /note="Description of Artificial Sequence: Synthetic oligonucleotide"
aggcuugagcaaguugguauc

SEQ ID NO: 3440 - RNA, 23 nt, Artificial Sequence
  source: /note="Description of Artificial Sequence: Synthetic oligonucleotide"
gauaccaacuugcucaagccuga

SEQ ID NO: 3441 - RNA, 21 nt, Artificial Sequence
  source: /note="Description of Artificial Sequence: Synthetic oligonucleotide"
gaaagagugucucaucuucuu

SEQ ID NO: 3442 - RNA, 23 nt, Artificial Sequence
  source: /note="Description of Artificial Sequence: Synthetic oligonucleotide"
aagaagaugagacacucuuucug

SEQ ID NO: 3443 - RNA, 21 nt, Artificial Sequence
  source: /note="Description of Artificial Sequence: Synthetic oligonucleotide"
auuucuggaacuaguaaauuc

SEQ ID NO: 3444 - RNA, 23 nt, Artificial Sequence
  source: /note="Description of Artificial Sequence: Synthetic oligonucleotide"
gaauuuacuaguuccagaaauau

SEQ ID NO: 3445 - RNA, 21 nt, Artificial Sequence
  source: /note="Description of Artificial Sequence: Synthetic oligonucleotide"
ugugauguggcccaugaguuu

SEQ ID NO: 3446 - RNA, 23 nt, Artificial Sequence
  source: /note="Description of Artificial Sequence: Synthetic oligonucleotide"
aaacucaugggccacaucacaca

SEQ ID NO: 3447 - RNA, 21 nt, Artificial Sequence
  source: /note="Description of Artificial Sequence: Synthetic oligonucleotide"
aagagagaaguccuauuucuc

SEQ ID NO: 3448 - RNA, 23 nt, Artificial Sequence
  source: /note="Description of Artificial Sequence: Synthetic oligonucleotide"
gagaaauaggacuucucucuuuc

SEQ ID NO: 3449 - RNA, 21 nt, Artificial Sequence
  source: /note="Description of Artificial Sequence: Synthetic oligonucleotide"
uggcagcacagaugaaucaga

SEQ ID NO: 3450 - RNA, 23 nt, Artificial Sequence
  source: /note="Description of Artificial Sequence: Synthetic oligonucleotide"
ucugauucaucugugcugccagg

SEQ ID NO: 3451 - RNA, 21 nt, Artificial Sequence
  source: /note="Description of Artificial Sequence: Synthetic oligonucleotide"
augaucguuucuuugagaaaa

SEQ ID NO: 3452 - RNA, 23 nt, Artificial Sequence
  source: /note="Description of Artificial Sequence: Synthetic oligonucleotide"
uuuucucaaagaaacgaucauac

SEQ ID NO: 3453 - RNA, 21 nt, Artificial Sequence
  source: /note="Description of Artificial Sequence: Synthetic oligonucleotide"
ucuggaacuaguaaauuccau

SEQ ID NO: 3454 - RNA, 23 nt, Artificial Sequence
  source: /note="Description of Artificial Sequence: Synthetic oligonucleotide"
auggaauuuacuaguuccagaaa

SEQ ID NO: 3455 - RNA, 19 nt, Artificial Sequence
  source: /note="Description of Artificial Sequence: Synthetic oligonucleotide"
gcccauucuuaucccgagu

SEQ ID NO: 3456 - RNA, 19 nt, Artificial Sequence
  source: /note="Description of Artificial Sequence: Synthetic oligonucleotide"
acucgggauaagaaugggc

SEQ ID NO: 3457 - RNA, 19 nt, Artificial Sequence
  source: /note="Description of Artificial Sequence: Synthetic oligonucleotide"
ggaaccaugccuccaugau

SEQ ID NO: 3458 - RNA, 19 nt, Artificial Sequence
  source: /note="Description of Artificial Sequence: Synthetic oligonucleotide"
aucauggaggcaugguucc

SEQ ID NO: 3459 - RNA, 19 nt, Artificial Sequence
  source: /note="Description of Artificial Sequence: Synthetic oligonucleotide"
uggagucugugcggauccu

SEQ ID NO: 3460 - RNA, 19 nt, Artificial Sequence
  source: /note="Description of Artificial Sequence: Synthetic oligonucleotide"
aggauccgcacagacucca

SEQ ID NO: 3461 - RNA, 19 nt, Artificial Sequence
  source: /note="Description of Artificial Sequence: Synthetic oligonucleotide"
cacccacggguguguggga

SEQ ID NO: 3462 - RNA, 19 nt, Artificial Sequence
  source: /note="Description of Artificial Sequence: Synthetic oligonucleotide"
ucccacacacccgugggug

SEQ ID NO: 3463 - RNA, 19 nt, Artificial Sequence
  source: /note="Description of Artificial Sequence: Synthetic oligonucleotide"
ggagucugugcggauccua

SEQ ID NO: 3464 - RNA, 19 nt, Artificial Sequence
  source: /note="Description of Artificial Sequence: Synthetic oligonucleotide"
uaggauccgcacagacucc

SEQ ID NO: 3465 - RNA, 19 nt, Artificial Sequence
  source: /note="Description of Artificial Sequence: Synthetic oligonucleotide"
caaaacugccccaagauga

SEQ ID NO: 3466 - RNA, 19 nt, Artificial Sequence
  source: /note="Description of Artificial Sequence: Synthetic oligonucleotide"
ucaucuuggggcaguuuug

SEQ ID NO: 3467 - RNA, 19 nt, Artificial Sequence
  source: /note="Description of Artificial Sequence: Synthetic oligonucleotide"
gccuccaugauccaaggga

SEQ ID NO: 3468 - RNA, 19 nt, Artificial Sequence
  source: /note="Description of Artificial Sequence: Synthetic oligonucleotide"
ucccuuggaucauggaggc

SEQ ID NO: 3469 - RNA, 19 nt, Artificial Sequence
  source: /note="Description of Artificial Sequence: Synthetic oligonucleotide"
caucaucccugugcggguu

SEQ ID NO: 3470 - RNA, 19 nt, Artificial Sequence
  source: /note="Description of Artificial Sequence: Synthetic oligonucleotide"
aacccgcacagggaugaug

SEQ ID NO: 3471 - RNA, 19 nt, Artificial Sequence
  source: /note="Description of Artificial Sequence: Synthetic oligonucleotide"
acccacgggugugugggga

SEQ ID NO: 3472 - RNA, 19 nt, Artificial Sequence
  source: /note="Description of Artificial Sequence: Synthetic oligonucleotide"
uccccacacacccgugggu

SEQ ID NO: 3473 - RNA, 19 nt, Artificial Sequence
  source: /note="Description of Artificial Sequence: Synthetic oligonucleotide"
cacaucaucccugugcgga

SEQ ID NO: 3474 - RNA, 19 nt, Artificial Sequence
  source: /note="Description of Artificial Sequence: Synthetic oligonucleotide"
uccgcacagggaugaugug

SEQ ID NO: 3475 - RNA, 19 nt, Artificial Sequence
  source: /note="Description of Artificial Sequence: Synthetic oligonucleotide"
cagaaagagugucucaucu

SEQ ID NO: 3476 - RNA, 19 nt, Artificial Sequence
  source: /note="Description of Artificial Sequence: Synthetic oligonucleotide"
agaugagacacucuuucug

SEQ ID NO: 3477 - RNA, 19 nt, Artificial Sequence
  source: /note="Description of Artificial Sequence: Synthetic oligonucleotide"
ccuccaugauccaagggau

SEQ ID NO: 3478 - RNA, 19 nt, Artificial Sequence
  source: /note="Description of Artificial Sequence: Synthetic oligonucleotide"
aucccuuggaucauggagg

SEQ ID NO: 3479 - RNA, 19 nt, Artificial Sequence
  source: /note="Description of Artificial Sequence: Synthetic oligonucleotide"
ugcccauucuuaucccgaa

SEQ ID NO: 3480 - RNA, 19 nt, Artificial Sequence
  source: /note="Description of Artificial Sequence: Synthetic oligonucleotide"
uucgggauaagaaugggca

SEQ ID NO: 3481 - RNA, 19 nt, Artificial Sequence
  source: /note="Description of Artificial Sequence: Synthetic oligonucleotide"
cuucacccuggcuaagaua

SEQ ID NO: 3482 - RNA, 19 nt, Artificial Sequence
  source: /note="Description of Artificial Sequence: Synthetic oligonucleotide"
uaucuuagccagggugaag

SEQ ID NO: 3483 - RNA, 19 nt, Artificial Sequence
  source: /note="Description of Artificial Sequence: Synthetic oligonucleotide"
aucaucccugugcggguua

SEQ ID NO: 3484 - RNA, 19 nt, Artificial Sequence
  source: /note="Description of Artificial Sequence: Synthetic oligonucleotide"
uaacccgcacagggaugau

SEQ ID NO: 3485 - RNA, 19 nt, Artificial Sequence
  source: /note="Description of Artificial Sequence: Synthetic oligonucleotide"
agaaagagugucucaucuu

SEQ ID NO: 3486 - RNA, 19 nt, Artificial Sequence
  source: /note="Description of Artificial Sequence: Synthetic oligonucleotide"
aagaugagacacucuuucu

SEQ ID NO: 3487 - RNA, 19 nt, Artificial Sequence
  source: /note="Description of Artificial Sequence: Synthetic oligonucleotide"
cuccaugauccaagggauu

SEQ ID NO: 3488 - RNA, 19 nt, Artificial Sequence
  source: /note="Description of Artificial Sequence: Synthetic oligonucleotide"
aaucccuuggaucauggag

SEQ ID NO: 3489 - RNA, 19 nt, Artificial Sequence
  source: /note="Description of Artificial Sequence: Synthetic oligonucleotide"
ccauucuuaucccgaguca

SEQ ID NO: 3490 - RNA, 19 nt, Artificial Sequence
  source: /note="Description of Artificial Sequence: Synthetic oligonucleotide"
ugacucgggauaagaaugg

SEQ ID NO: 3491 - RNA, 19 nt, Artificial Sequence
  source: /note="Description of Artificial Sequence: Synthetic oligonucleotide"
cacccuggcuaagaugaua

SEQ ID NO: 3492 - RNA, 19 nt, Artificial Sequence
  source: /note="Description of Artificial Sequence: Synthetic oligonucleotide"
uaucaucuuagccagggug

SEQ ID NO: 3493 - RNA, 19 nt, Artificial Sequence
  source: /note="Description of Artificial Sequence: Synthetic oligonucleotide"
ucaucccugugcggguuga

SEQ ID NO: 3494 - RNA, 19 nt, Artificial Sequence
  source: /note="Description of Artificial Sequence: Synthetic oligonucleotide"
ucaacccgcacagggauga

SEQ ID NO: 3495 - RNA, 19 nt, Artificial Sequence
  source: /note="Description of Artificial Sequence: Synthetic oligonucleotide"
aagagugucucaucuucuu

SEQ ID NO: 3496 - RNA, 19 nt, Artificial Sequence
  source: /note="Description of Artificial Sequence: Synthetic oligonucleotide"
aagaagaugagacacucuu

SEQ ID NO: 3497 - RNA, 19 nt, Artificial Sequence
  source: /note="Description of Artificial Sequence: Synthetic oligonucleotide"
gucaugccaaaaauggaca

SEQ ID NO: 3498 - RNA, 19 nt, Artificial Sequence
  source: /note="Description of Artificial Sequence: Synthetic oligonucleotide"
uguccauuuuuggcaugac

SEQ ID NO: 3499 - RNA, 19 nt, Artificial Sequence
  source: /note="Description of Artificial Sequence: Synthetic oligonucleotide"
cauucuuaucccgagucca

SEQ ID NO: 3500 - RNA, 19 nt, Artificial Sequence
  source: /note="Description of Artificial Sequence: Synthetic oligonucleotide"
uggacucgggauaagaaug

SEQ ID NO: 3501 - RNA, 19 nt, Artificial Sequence
  source: /note="Description of Artificial Sequence: Synthetic oligonucleotide"
acccuggcuaagaugauga

SEQ ID NO: 3502 - RNA, 19 nt, Artificial Sequence
  source: /note="Description of Artificial Sequence: Synthetic oligonucleotide"
ucaucaucuuagccagggu

SEQ ID NO: 3503 - RNA, 19 nt, Artificial Sequence
  source: /note="Description of Artificial Sequence: Synthetic oligonucleotide"
cucuucacccuggcuaaga

SEQ ID NO: 3504 - RNA, 19 nt, Artificial Sequence
  source: /note="Description of Artificial Sequence: Synthetic oligonucleotide"
ucuuagccagggugaagag

SEQ ID NO: 3505 - RNA, 19 nt, Artificial Sequence
  source: /note="Description of Artificial Sequence: Synthetic oligonucleotide"
augccaaaaauggacauca

SEQ ID NO: 3506 - RNA, 19 nt, Artificial Sequence
  source: /note="Description of Artificial Sequence: Synthetic oligonucleotide"
ugauguccauuuuuggcau

SEQ ID NO: 3507 - RNA, 19 nt, Artificial Sequence
  source: /note="Description of Artificial Sequence: Synthetic oligonucleotide"
ugccccaagaugauggaau

SEQ ID NO: 3508 - RNA, 19 nt, Artificial Sequence
  source: /note="Description of Artificial Sequence: Synthetic oligonucleotide"
auuccaucaucuuggggca

SEQ ID NO: 3509 - RNA, 19 nt, Artificial Sequence
  source: /note="Description of Artificial Sequence: Synthetic oligonucleotide"
gaaccaugccuccaugaua

SEQ ID NO: 3510 - RNA, 19 nt, Artificial Sequence
  source: /note="Description of Artificial Sequence: Synthetic oligonucleotide"
uaucauggaggcaugguuc

SEQ ID NO: 3511 - RNA, 19 nt, Artificial Sequence
  source: /note="Description of Artificial Sequence: Synthetic oligonucleotide"
ucuucacccuggcuaagau

SEQ ID NO: 3512 - RNA, 19 nt, Artificial Sequence
  source: /note="Description of Artificial Sequence: Synthetic oligonucleotide"
aucuuagccagggugaaga

SEQ ID NO: 3513 - RNA, 19 nt, Artificial Sequence
  source: /note="Description of Artificial Sequence: Synthetic oligonucleotide"
ugccaaaaauggacaucau

SEQ ID NO: 3514 - RNA, 19 nt, Artificial Sequence
  source: /note="Description of Artificial Sequence: Synthetic oligonucleotide"
augauguccauuuuuggca

SEQ ID NO: 3515 - RNA, 19 nt, Artificial Sequence
  source: /note="Description of Artificial Sequence: Synthetic oligonucleotide"
ccagaaagagugucucaua

SEQ ID NO: 3516 - RNA, 19 nt, Artificial Sequence
  source: /note="Description of Artificial Sequence: Synthetic oligonucleotide"
uaugagacacucuuucugg

SEQ ID NO: 3517 - RNA, 19 nt, Artificial Sequence
  source: /note="Description of Artificial Sequence: Synthetic oligonucleotide"
gaaacuguccauucaauga

SEQ ID NO: 3518 - RNA, 19 nt, Artificial Sequence
  source: /note="Description of Artificial Sequence: Synthetic oligonucleotide"
ucauugaauggacaguuuc

SEQ ID NO: 3519 - RNA, 19 nt, Artificial Sequence
  source: /note="Description of Artificial Sequence: Synthetic oligonucleotide"
ucacccuggcuaagaugau

SEQ ID NO: 3520 - RNA, 19 nt, Artificial Sequence
  source: /note="Description of Artificial Sequence: Synthetic oligonucleotide"
aucaucuuagccaggguga

SEQ ID NO: 3521 - RNA, 19 nt, Artificial Sequence
  source: /note="Description of Artificial Sequence: Synthetic oligonucleotide"
cccuggagucugugcggau

SEQ ID NO: 3522 - RNA, 19 nt, Artificial Sequence
  source: /note="Description of Artificial Sequence: Synthetic oligonucleotide"
auccgcacagacuccaggg

SEQ ID NO: 3523 - RNA, 19 nt, Artificial Sequence
  source: /note="Description of Artificial Sequence: Synthetic oligonucleotide"
gaaagagugucucaucuua

SEQ ID NO: 3524 - RNA, 19 nt, Artificial Sequence
  source: /note="Description of Artificial Sequence: Synthetic oligonucleotide"
uaagaugagacacucuuuc

SEQ ID NO: 3525 - RNA, 19 nt, Artificial Sequence
  source: /note="Description of Artificial Sequence: Synthetic oligonucleotide"
uggagcccuggagucugua

SEQ ID NO: 3526 - RNA, 19 nt, Artificial Sequence
  source: /note="Description of Artificial Sequence: Synthetic oligonucleotide"
uacagacuccagggcucca

SEQ ID NO: 3527 - RNA, 23 nt, Homo sapiens
augauguccauuuuuggcaugac

SEQ ID NO: 3528 - RNA, 21 nt, Homo sapiens
auuuugaagugaugagugaaa

SEQ ID NO: 3529 - RNA, 23 nt, Homo sapiens
uuucacucaucacuucaaaaugc

SEQ ID NO: 3530 - RNA, 21 nt, Homo sapiens
aguuauauuaaauuuuaaucu

SEQ ID NO: 3531 - RNA, 23 nt, Homo sapiens
agauuaaaauuuaauauaacuua

SEQ ID NO: 3532 - RNA, 21 nt, Homo sapiens
gcauuuugaagugaugaguga

SEQ ID NO: 3533 - RNA, 23 nt, Homo sapiens
ucacucaucacuucaaaaugcag

SEQ ID NO: 3534 - RNA, 21 nt, Homo sapiens
gaacuaaugagcagacauaac

SEQ ID NO: 3535 - RNA, 23 nt, Homo sapiens
guuaugucugcucauuaguucau

SEQ ID NO: 3536 - RNA, 21 nt, Homo sapiens
aaugaccacaccuaucgaguu

SEQ ID NO: 3537 - RNA, 23 nt, Homo sapiens
aacucgauagguguggucauucu

SEQ ID NO: 3538 - RNA, 21 nt, Homo sapiens
uaaauuuuaaucuauaguaaa

SEQ ID NO: 3539 - RNA, 23 nt, Homo sapiens
uuuacuauagauuaaaauuuaau

SEQ ID NO: 3540 - RNA, 21 nt, Homo sapiens
uucaguaugaucguuucuuug

SEQ ID NO: 3541 - RNA, 23 nt, Homo sapiens
caaagaaacgaucauacugaaaa

SEQ ID NO: 3542 - RNA, 21 nt, Homo sapiens
cacuuuucaguaugaucguuu

SEQ ID NO: 3543 - RNA, 23 nt, Homo sapiens
aaacgaucauacugaaaagugga

SEQ ID NO: 3544 - RNA, 21 nt, Homo sapiens
aaaucuguuuccacuuuucag

SEQ ID NO: 3545 - RNA, 23 nt, Homo sapiens
cugaaaaguggaaacagauuuug

SEQ ID NO: 3546 - RNA, 21 nt, Homo sapiens
cauuugaaacuguccauucaa

SEQ ID NO: 3547 - RNA, 23 nt, Homo sapiens
uugaauggacaguuucaaaugcc

SEQ ID NO: 3548 - RNA, 21 nt, Homo sapiens
ccuaucgaguuuuuaaaacug

SEQ ID NO: 3549 - RNA, 23 nt, Homo sapiens
caguuuuaaaaacucgauaggug

SEQ ID NO: 3550 - RNA, 21 nt, Homo sapiens
gaccagaaagagugucucauc

SEQ ID NO: 3551 - RNA, 23 nt, Homo sapiens
gaugagacacucuuucuggucuu

SEQ ID NO: 3552 - RNA, 21 nt, Homo sapiens
accagaaagagugucucaucu

SEQ ID NO: 3553 - RNA, 23 nt, Homo sapiens
agaugagacacucuuucuggucu

SEQ ID NO: 3554 - RNA, 21 nt, Homo sapiens
acuaaugagcagacauaacau

SEQ ID NO: 3555 - RNA, 23 nt, Homo sapiens
auguuaugucugcucauuaguuc

SEQ ID NO: 3556 - RNA, 21 nt, Homo sapiens
uaguaaaaacauaguccugga

SEQ ID NO: 3557 - RNA, 23 nt, Homo sapiens
uccaggacuauguuuuuacuaua

SEQ ID NO: 3558 - RNA, 21 nt, Homo sapiens
uauuucuggaacuaguaaauu

SEQ ID NO: 3559 - RNA, 23 nt, Homo sapiens
aauuuacuaguuccagaaauauu

SEQ ID NO: 3560 - RNA, 21 nt, Homo sapiens
uucugcaaagccagucuugag

SEQ ID NO: 3561 - RNA, 23 nt, Homo sapiens
cucaagacuggcuuugcagaaga

SEQ ID NO: 3562 - RNA, 21 nt, Homo sapiens
gaggaaagagguugcugaaac

SEQ ID NO: 3563 - RNA, 23 nt, Homo sapiens
guuucagcaaccucuuuccucac

SEQ ID NO: 3564 - RNA, 21 nt, Homo sapiens
gguacuagaaauauuucugga

SEQ ID NO: 3565 - RNA, 23 nt, Homo sapiens
uccagaaauauuucuaguaccac

SEQ ID NO: 3566 - RNA, 21 nt, Homo sapiens
gacaucaugcaaaagcaaaga

SEQ ID NO: 3567 - RNA, 23 nt, Homo sapiens
ucuuugcuuuugcaugauguccu

SEQ ID NO: 3568 - RNA, 21 nt, Homo sapiens
aaauuuuaaucuauaguaaaa

SEQ ID NO: 3569 - RNA, 23 nt, Homo sapiens
uuuuacuauagauuaaaauuuaa

SEQ ID NO: 3570 - RNA, 21 nt, Homo sapiens
caugauccaagggauucgaaa

SEQ ID NO: 3571 - RNA, 23 nt, Homo sapiens
uuucgaaucccuuggaucaugga

SEQ ID NO: 3572 - RNA, 21 nt, Homo sapiens
agaccagaaagagugucucau

SEQ ID NO: 3573 - RNA, 23 nt, Homo sapiens
augagacacucuuucuggucuuu

SEQ ID NO: 3574 - RNA, 21 nt, Homo sapiens
auccugaagagcgcugaggga

SEQ ID NO: 3575 - RNA, 23 nt, Homo sapiens
ucccucagcgcucuucaggaucc

SEQ ID NO: 3576 - RNA, 21 nt, Homo sapiens
gucugugaugaacuaaugagc

SEQ ID NO: 3577 - RNA, 23 nt, Homo sapiens
gcucauuaguucaucacagacuu

SEQ ID NO: 3578 - RNA, 21 nt, Homo sapiens
cagaaagagugucucaucuuc

SEQ ID NO: 3579 - RNA, 23 nt, Homo sapiens
gaagaugagacacucuuucuggu

SEQ ID NO: 3580 - RNA, 21 nt, Homo sapiens
acuuuucaguaugaucguuuc

SEQ ID NO: 3581 - RNA, 23 nt, Homo sapiens
gaaacgaucauacugaaaagugg

SEQ ID NO: 3582 - RNA, 21 nt, Homo sapiens
ucaugccaaaaauggacauca

SEQ ID NO: 3583 - RNA, 23 nt, Homo sapiens
ugauguccauuuuuggcaugacu

SEQ ID NO: 3584 - RNA, 21 nt, Homo sapiens
aauauuucuggaacuaguaaa

SEQ ID NO: 3585 - RNA, 23 nt, Homo sapiens
uuuacuaguuccagaaauauuuc

SEQ ID NO: 3586 - RNA, 21 nt, Homo sapiens
cuucuucaagauaacuugcca

SEQ ID NO: 3587 - RNA, 23 nt, Homo sapiens
uggcaaguuaucuugaagaagau

SEQ ID NO: 3588 - RNA, 21 nt, Homo sapiens
uuucaguaugaucguuucuuu

SEQ ID NO: 3589 - RNA, 23 nt, Homo sapiens
aaagaaacgaucauacugaaaag

SEQ ID NO: 3590 - RNA, 21 nt, Homo sapiens
cccagugugguuagugugaaa

SEQ ID NO: 3591 - RNA, 23 nt, Homo sapiens
uuucacacuaaccacacuggggc

SEQ ID NO: 3592 - RNA, 21 nt, Homo sapiens
gcugugagauuuacucugauu

SEQ ID NO: 3593 - RNA, 23 nt, Homo sapiens
aaucagaguaaaucucacagccu

SEQ ID NO: 3594 - RNA, 21 nt, Homo sapiens
aggcuugagcaaguugguauc

SEQ ID NO: 3595 - RNA, 23 nt, Homo sapiens
gauaccaacuugcucaagccuga

SEQ ID NO: 3596 - RNA, 21 nt, Homo sapiens
gaaagagugucucaucuucuu

SEQ ID NO: 3597 - RNA, 23 nt, Homo sapiens
aagaagaugagacacucuuucug

SEQ ID NO: 3598 - RNA, 21 nt, Homo sapiens
auuucuggaacuaguaaauuc

SEQ ID NO: 3599 - RNA, 23 nt, Homo sapiens
gaauuuacuaguuccagaaauau

SEQ ID NO: 3600 - RNA, 21 nt, Homo sapiens
ugugauguggcccaugaguuu

SEQ ID NO: 3601 - RNA, 23 nt, Homo sapiens
aaacucaugggccacaucacaca

SEQ ID NO: 3602 - RNA, 21 nt, Homo sapiens
aagagagaaguccuauuucuc

SEQ ID NO: 3603 - RNA, 23 nt, Homo sapiens
gagaaauaggacuucucucuuuc

SEQ ID NO: 3604 - RNA, 21 nt, Homo sapiens
uggcagcacagaugaaucaga

SEQ ID NO: 3605 - RNA, 23 nt, Homo sapiens
ucugauucaucugugcugccagg

SEQ ID NO: 3606 - RNA, 21 nt, Homo sapiens
augaucguuucuuugagaaaa

SEQ ID NO: 3607 - RNA, 23 nt, Homo sapiens
uuuucucaaagaaacgaucauac

SEQ ID NO: 3608 - RNA, 21 nt, Homo sapiens
ucuggaacuaguaaauuccau

SEQ ID NO: 3609 - RNA, 23 nt, Homo sapiens
auggaauuuacuaguuccagaaa

SEQ ID NO: 3610 - RNA, 19 nt, Homo sapiens
gcccauucuuaucccgagu

SEQ ID NO: 3611 - RNA, 19 nt, Homo sapiens
acucgggauaagaaugggc

SEQ ID NO: 3612 - RNA, 19 nt, Homo sapiens
ggaaccaugccuccaugau

SEQ ID NO: 3613 - RNA, 19 nt, Homo sapiens
aucauggaggcaugguucc

SEQ ID NO: 3614 - RNA, 19 nt, Homo sapiens
uggagucugugcggauccu

SEQ ID NO: 3615 - RNA, 19 nt, Homo sapiens
aggauccgcacagacucca

SEQ ID NO: 3616 - RNA, 19 nt, Homo sapiens
cacccacggguguguggga

SEQ ID NO: 3617 - RNA, 19 nt, Homo sapiens
ucccacacacccgugggug

SEQ ID NO: 3618 - RNA, 19 nt, Homo sapiens
ggagucugugcggauccua

SEQ ID NO: 3619 - RNA, 19 nt, Homo sapiens
uaggauccgcacagacucc

SEQ ID NO: 3620 - RNA, 19 nt, Homo sapiens
caaaacugccccaagauga

SEQ ID NO: 3621 - RNA, 19 nt, Homo sapiens
ucaucuuggggcaguuuug

SEQ ID NO: 3622 - RNA, 19 nt, Homo sapiens
gccuccaugauccaaggga

SEQ ID NO: 3623 - RNA, 19 nt, Homo sapiens
ucccuuggaucauggaggc

SEQ ID NO: 3624 - RNA, 19 nt, Homo sapiens
caucaucccugugcggguu

SEQ ID NO: 3625 - RNA, 19 nt, Homo sapiens
aacccgcacagggaugaug

SEQ ID NO: 3626 - RNA, 19 nt, Homo sapiens
acccacgggugugugggga

SEQ ID NO: 3627 - RNA, 19 nt, Homo sapiens
uccccacacacccgugggu

SEQ ID NO: 3628 - RNA, 19 nt, Homo sapiens
cacaucaucccugugcgga

SEQ ID NO: 3629 - RNA, 19 nt, Homo sapiens
uccgcacagggaugaugug

SEQ ID NO: 3630 - RNA, 19 nt, Homo sapiens
cagaaagagugucucaucu

SEQ ID NO: 3631 - RNA, 19 nt, Homo sapiens
agaugagacacucuuucug

SEQ ID NO: 3632 - RNA, 19 nt, Homo sapiens
ccuccaugauccaagggau

SEQ ID NO: 3633 - RNA, 19 nt, Homo sapiens
aucccuuggaucauggagg

SEQ ID NO: 3634 - RNA, 19 nt, Homo sapiens
ugcccauucuuaucccgaa

SEQ ID NO: 3635 - RNA, 19 nt, Homo sapiens
uucgggauaagaaugggca

SEQ ID NO: 3636 - RNA, 19 nt, Homo sapiens
cuucacccuggcuaagaua

SEQ ID NO: 3637 - RNA, 19 nt, Homo sapiens
uaucuuagccagggugaag

SEQ ID NO: 3638 - RNA, 19 nt, Homo sapiens
aucaucccugugcggguua

SEQ ID NO: 3639 - RNA, 19 nt, Homo sapiens
uaacccgcacagggaugau

SEQ ID NO: 3640 - RNA, 19 nt, Homo sapiens
agaaagagugucucaucuu

SEQ ID NO: 3641 - RNA, 19 nt, Homo sapiens
aagaugagacacucuuucu

SEQ ID NO: 3642 - RNA, 19 nt, Homo sapiens
cuccaugauccaagggauu

SEQ ID NO: 3643 - RNA, 19 nt, Homo sapiens
aaucccuuggaucauggag

SEQ ID NO: 3644 - RNA, 19 nt, Homo sapiens
ccauucuuaucccgaguca

SEQ ID NO: 3645 - RNA, 19 nt, Homo sapiens
ugacucgggauaagaaugg

SEQ ID NO: 3646 - RNA, 19 nt, Homo sapiens
cacccuggcuaagaugaua

SEQ ID NO: 3647 - RNA, 19 nt, Homo sapiens
uaucaucuuagccagggug

SEQ ID NO: 3648 - RNA, 19 nt, Homo sapiens
ucaucccugugcggguuga

SEQ ID NO: 3649 - RNA, 19 nt, Homo sapiens
ucaacccgcacagggauga

SEQ ID NO: 3650 - RNA, 19 nt, Homo sapiens
aagagugucucaucuucuu

SEQ ID NO: 3651 - RNA, 19 nt, Homo sapiens
aagaagaugagacacucuu

SEQ ID NO: 3652 - RNA, 19 nt, Homo sapiens
gucaugccaaaaauggaca

SEQ ID NO: 3653 - RNA, 19 nt, Homo sapiens
uguccauuuuuggcaugac

SEQ ID NO: 3654 - RNA, 19 nt, Homo sapiens
cauucuuaucccgagucca

SEQ ID NO: 3655 - RNA, 19 nt, Homo sapiens
uggacucgggauaagaaug

SEQ ID NO: 3656 - RNA, 19 nt, Homo sapiens
acccuggcuaagaugauga

SEQ ID NO: 3657 - RNA, 19 nt, Homo sapiens
ucaucaucuuagccagggu

SEQ ID NO: 3658 - RNA, 19 nt, Homo sapiens
cucuucacccuggcuaaga

SEQ ID NO: 3659 - RNA, 19 nt, Homo sapiens
ucuuagccagggugaagag

SEQ ID NO: 3660 - RNA, 19 nt, Homo sapiens
augccaaaaauggacauca

SEQ ID NO: 3661 - RNA, 19 nt, Homo sapiens
ugauguccauuuuuggcau

SEQ ID NO: 3662 - RNA, 19 nt, Homo sapiens
ugccccaagaugauggaau

SEQ ID NO: 3663 - RNA, 19 nt, Homo sapiens
auuccaucaucuuggggca

SEQ ID NO: 3664 - RNA, 19 nt, Homo sapiens
gaaccaugccuccaugaua

SEQ ID NO: 3665 - RNA, 19 nt, Homo sapiens
uaucauggaggcaugguuc

SEQ ID NO: 3666 - RNA, 19 nt, Homo sapiens
ucuucacccuggcuaagau

SEQ ID NO: 3667 - RNA, 19 nt, Homo sapiens
aucuuagccagggugaaga

SEQ ID NO: 3668 - RNA, 19 nt, Homo sapiens
ugccaaaaauggacaucau

SEQ ID NO: 3669 - RNA, 19 nt, Homo sapiens
augauguccauuuuuggca

SEQ ID NO: 3670 - RNA, 19 nt, Homo sapiens
ccagaaagagugucucaua

SEQ ID NO: 3671 - RNA, 19 nt, Homo sapiens
uaugagacacucuuucugg

SEQ ID NO: 3672 - RNA, 19 nt, Homo sapiens
gaaacuguccauucaauga

SEQ ID NO: 3673 - RNA, 19 nt, Homo sapiens
ucauugaauggacaguuuc

SEQ ID NO: 3674 - RNA, 19 nt, Homo sapiens
ucacccuggcuaagaugau

SEQ ID NO: 3675 - RNA, 19 nt, Homo sapiens
aucaucuuagccaggguga

SEQ ID NO: 3676 - RNA, 19 nt, Homo sapiens
cccuggagucugugcggau

SEQ ID NO: 3677 - RNA, 19 nt, Homo sapiens
auccgcacagacuccaggg

SEQ ID NO: 3678 - RNA, 19 nt, Homo sapiens
gaaagagugucucaucuua

SEQ ID NO: 3679 - RNA, 19 nt, Homo sapiens
uaagaugagacacucuuuc

SEQ ID NO: 3680 - RNA, 19 nt, Homo sapiens
uggagcccuggagucugua

SEQ ID NO: 3681 - RNA, 19 nt, Homo sapiens
uacagacuccagggcucca

SEQ ID NO: 3682 - DNA, 21 bp, Artificial Sequence
  source: /note="Description of Artificial Sequence: Synthetic oligonucleotide"
  source: /note="Description of Combined DNA/RNA Molecule: Synthetic oligonucleotide"
cuuacgcugaguacuucgatt

SEQ ID NO: 3683 - DNA, 21 bp, Artificial Sequence
  source: /note="Description of Artificial Sequence: Synthetic oligonucleotide"
  source: /note="Description of Combined DNA/RNA Molecule: Synthetic oligonucleotide"
ucgaaguacucagcguaagtt

SEQ ID NO: 3684 - RNA, 21 nt, Homo sapiens
caugccaaaaauggacaucau

SEQ ID NO: 3685 - DNA, 21 bp, Artificial Sequence
  source: /note="Description of Artificial Sequence: Synthetic oligonucleotide"
  source: /note="Description of Combined DNA/RNA Molecule: Synthetic oligonucleotide"
caggcaaaucucuguuguutt

SEQ ID NO: 3686 - DNA, 21 bp, Artificial Sequence
  source: /note="Description of Artificial Sequence: Synthetic oligonucleotide"
  source: /note="Description of Combined DNA/RNA Molecule: Synthetic oligonucleotide"
aacaacagagauuugccugtt

SEQ ID NO: 3687 - DNA, 21 bp, Artificial Sequence
  source: /note="Description of Artificial Sequence: Synthetic oligonucleotide"
  source: /note="Description of Combined DNA/RNA Molecule: Synthetic oligonucleotide"
gaaaaaaauugaugagaaatt

SEQ ID NO: 3688 - DNA, 21 bp, Artificial Sequence
  source: /note="Description of Artificial Sequence: Synthetic oligonucleotide"
  source: /note="Description of Combined DNA/RNA Molecule: Synthetic oligonucleotide"
uuucucaucaauuuuuuuctt

SEQ ID NO: 3689 - DNA, 21 bp, Artificial Sequence
  source: /note="Description of Artificial Sequence: Synthetic oligonucleotide"
  source: /note="Description of Combined DNA/RNA Molecule: Synthetic oligonucleotide"
ggaaagaugccgcacucuutt

SEQ ID NO: 3690 - DNA, 21 bp, Artificial Sequence
  source: /note="Description of Artificial Sequence: Synthetic oligonucleotide"
  source: /note="Description of Combined DNA/RNA Molecule: Synthetic oligonucleotide"
aagagugcggcaucuuucctt

SEQ ID NO: 3691 - DNA, 21 bp, Artificial Sequence
  source: /note="Description of Artificial Sequence: Synthetic oligonucleotide"
  source: /note="Description of Combined DNA/RNA Molecule: Synthetic oligonucleotide"
ugucucaucuucuucaagatt

SEQ ID NO: 3692 - DNA, 21 bp, Artificial Sequence
  source: /note="Description of Artificial Sequence: Synthetic oligonucleotide"
  source: /note="Description of Combined DNA/RNA Molecule: Synthetic oligonucleotide"
ucuugaagaagaugagacatt

SEQ ID NO: 3693 - DNA, 21 bp, Artificial Sequence
  source: /note="Description of Artificial Sequence: Synthetic oligonucleotide"
  source: /note="Description of Combined DNA/RNA Molecule: Synthetic oligonucleotide"
acaucuacgugcaagcaautt

SEQ ID NO: 3694 - DNA, 21 bp, Artificial Sequence
  source: /note="Description of Artificial Sequence: Synthetic oligonucleotide"
  source: /note="Description of Combined DNA/RNA Molecule: Synthetic oligonucleotide"
auugcuugcacguagaugutt

SEQ ID NO: 3695 - DNA, 21 bp, Artificial Sequence
  source: /note="Description of Artificial Sequence: Synthetic oligonucleotide"
  source: /note="Description of Combined DNA/RNA Molecule: Synthetic oligonucleotide"
uucucugauugacaccguatt

SEQ ID NO: 3696 - DNA, 21 bp, Artificial Sequence
  source: /note="Description of Artificial Sequence: Synthetic oligonucleotide"
  source: /note="Description of Combined DNA/RNA Molecule: Synthetic oligonucleotide"
uacggugucaaucagagaatt

SEQ ID NO: 3697 - DNA, 21 bp, Artificial Sequence
  source: /note="Description of Artificial Sequence: Synthetic oligonucleotide"
  source: /note="Description of Combined DNA/RNA Molecule: Synthetic oligonucleotide"
gcugcuggcuucaucuucatt

SEQ ID NO: 3698 - DNA, 21 bp, Artificial Sequence
  source: /note="Description of Artificial Sequence: Synthetic oligonucleotide"
  source: /note="Description of Combined DNA/RNA Molecule: Synthetic oligonucleotide"
ugaagaugaagccagcagctt

SEQ ID NO: 3699 - DNA, 21 bp, Artificial Sequence
  source: /note="Description of Artificial Sequence: Synthetic oligonucleotide"
  source: /note="Description of Combined DNA/RNA Molecule: Synthetic oligonucleotide"
agcgcaacgucaaacucautt

SEQ ID NO: 3700 - DNA, 21 bp, Artificial Sequence
  source: /note="Description of Artificial Sequence: Synthetic oligonucleotide"
  source: /note="Description of Combined DNA/RNA Molecule: Synthetic oligonucleotide"
augaguuugacguugcgcutt

SEQ ID NO: 3701 - DNA, 21 bp, Artificial Sequence
  source: /note="Description of Artificial Sequence: Synthetic oligonucleotide"
  source: /note="Description of Combined DNA/RNA Molecule: Synthetic oligonucleotide"
uauuucuggaacuaguaaatt

SEQ ID NO: 3702 - DNA, 21 bp, Artificial Sequence
  source: /note="Description of Artificial Sequence: Synthetic oligonucleotide"
  source: /note="Description of Combined DNA/RNA Molecule: Synthetic oligonucleotide"
uuuacuaguuccagaaauatt

SEQ ID NO: 3703 - DNA, 21 bp, Artificial Sequence
  source: /note="Description of Artificial Sequence: Synthetic oligonucleotide"
  source: /note="Description of Combined DNA/RNA Molecule: Synthetic oligonucleotide"
gguuguguuggaggguacatt

SEQ ID NO: 3704 - DNA, 21 bp, Artificial Sequence
  source: /note="Description of Artificial Sequence: Synthetic oligonucleotide"
  source: /note="Description of Combined DNA/RNA Molecule: Synthetic oligonucleotide"
uguacccuccaacacaacctt

SEQ ID NO: 3705 - DNA, 21 bp, Artificial Sequence
  source: /note="Description of Artificial Sequence: Synthetic oligonucleotide"
  source: /note="Description of Combined DNA/RNA Molecule: Synthetic oligonucleotide"
gugucagucuggugcaguatt

SEQ ID NO: 3706 - DNA, 21 bp, Artificial Sequence
  source: /note="Description of Artificial Sequence: Synthetic oligonucleotide"
  source: /note="Description of Combined DNA/RNA Molecule: Synthetic oligonucleotide"
uacugcaccagacugacactt

SEQ ID NO: 3707 - DNA, 21 bp, Artificial Sequence
  source: /note="Description of Artificial Sequence: Synthetic oligonucleotide"
  source: /note="Description of Combined DNA/RNA Molecule: Synthetic oligonucleotide"
cuuuguggccaaugacucatt

SEQ ID NO: 3708 - DNA, 21 bp, Artificial Sequence
  source: /note="Description of Artificial Sequence: Synthetic oligonucleotide"
  source: /note="Description of Combined DNA/RNA Molecule: Synthetic oligonucleotide"
ugagucauuggccacaaagtt

SEQ ID NO: 3709 - DNA, 21 bp, Artificial Sequence
  source: /note="Description of Artificial Sequence: Synthetic oligonucleotide"
  source: /note="Description of Combined DNA/RNA Molecule: Synthetic oligonucleotide"
agaugcugcuaaaaacacatt

SEQ ID NO: 3710 - DNA, 21 bp, Artificial Sequence
  source: /note="Description of Artificial Sequence: Synthetic oligonucleotide"
  source: /note="Description of Combined DNA/RNA Molecule: Synthetic oligonucleotide"
uguguuuuuagcagcaucutt

SEQ ID NO: 3711 - DNA, 21 bp, Artificial Sequence
  source: /note="Description of Artificial Sequence: Synthetic oligonucleotide"
  source: /note="Description of Combined DNA/RNA Molecule: Synthetic oligonucleotide"
gagucaugccaaaaauggatt

SEQ ID NO: 3712 - DNA, 21 bp, Artificial Sequence
  source: /note="Description of Artificial Sequence: Synthetic oligonucleotide"
  source: /note="Description of Combined DNA/RNA Molecule: Synthetic oligonucleotide"
uccauuuuuggcaugacuctt

SEQ ID NO: 3713 - DNA, 21 bp, Artificial Sequence
  source: /note="Description of Artificial Sequence: Synthetic oligonucleotide"
  source: /note="Description of Combined DNA/RNA Molecule: Synthetic oligonucleotide"
cugugcggauccugaagagtt

SEQ ID NO: 3714 - DNA, 21 bp, Artificial Sequence
  source: /note="Description of Artificial Sequence: Synthetic oligonucleotide"
  source: /note="Description of Combined DNA/RNA Molecule: Synthetic oligonucleotide"
cucuucaggauccgcacagtt

SEQ ID NO: 3715 - DNA, 21 bp, Artificial Sequence
  source: /note="Description of Artificial Sequence: Synthetic oligonucleotide"
  source: /note="Description of Combined DNA/RNA Molecule: Synthetic oligonucleotide"
cacuuugaaacaacauggutt

SEQ ID NO: 3716 - DNA, 21 bp, Artificial Sequence
  source: /note="Description of Artificial Sequence: Synthetic oligonucleotide"
  source: /note="Description of Combined DNA/RNA Molecule: Synthetic oligonucleotide"
accauguuguuucaaagugtt

SEQ ID NO: 3717 - DNA, 21 bp, Artificial Sequence
  source: /note="Description of Artificial Sequence: Synthetic oligonucleotide"
  source: /note="Description of Combined DNA/RNA Molecule: Synthetic oligonucleotide"
aagugaugagugaaagagatt

SEQ ID NO: 3718 - DNA, 21 bp, Artificial Sequence
  source: /note="Description of Artificial Sequence: Synthetic oligonucleotide"
  source: /note="Description of Combined DNA/RNA Molecule: Synthetic oligonucleotide"
ucucuuucacucaucacuutt

SEQ ID NO: 3719 - DNA, 21 bp, Artificial Sequence
  source: /note="Description of Artificial Sequence: Synthetic oligonucleotide"
  source: /note="Description of Combined DNA/RNA Molecule: Synthetic oligonucleotide"
aucugcuagucacauggaatt

SEQ ID NO: 3720 - DNA, 21 bp, Artificial Sequence
  source: /note="Description of Artificial Sequence: Synthetic oligonucleotide"
  source: /note="Description of Combined DNA/RNA Molecule: Synthetic oligonucleotide"
uuccaugugacuagcagautt

SEQ ID NO: 3721 - DNA, 21 bp, Artificial Sequence
  source: /note="Description of Artificial Sequence: Synthetic oligonucleotide"
  source: /note="Description of Combined DNA/RNA Molecule: Synthetic oligonucleotide"
uggggcaggugguacuagatt

SEQ ID NO: 3722 - DNA, 21 bp, Artificial Sequence
  source: /note="Description of Artificial Sequence: Synthetic oligonucleotide"
  source: /note="Description of Combined DNA/RNA Molecule: Synthetic oligonucleotide"
ucuaguaccaccugccccatt

SEQ ID NO: 3723 - DNA, 21 bp, Artificial Sequence
  source: /note="Description of Artificial Sequence: Synthetic oligonucleotide"
  source: /note="Description of Combined DNA/RNA Molecule: Synthetic oligonucleotide"
gcagaugacuauucagacutt

SEQ ID NO: 3724 - DNA, 21 bp, Artificial Sequence
  source: /note="Description of Artificial Sequence: Synthetic oligonucleotide"
  source: /note="Description of Combined DNA/RNA Molecule: Synthetic oligonucleotide"
agucugaauagucaucugctt

SEQ ID NO: 3725 - DNA, 21 bp, Artificial Sequence
  source: /note="Description of Artificial Sequence: Synthetic oligonucleotide"
  source: /note="Description of Combined DNA/RNA Molecule: Synthetic oligonucleotide"
gccucauuccucagcugagtt

SEQ ID NO: 3726 - DNA, 21 bp, Artificial Sequence
  source: /note="Description of Artificial Sequence: Synthetic oligonucleotide"
  source: /note="Description of Combined DNA/RNA Molecule: Synthetic oligonucleotide"
cucagcugaggaaugaggctt

SEQ ID NO: 3727 - DNA, 21 bp, Artificial Sequence
  source: /note="Description of Artificial Sequence: Synthetic oligonucleotide"
  source: /note="Description of Combined DNA/RNA Molecule: Synthetic oligonucleotide"
guaugaucguuucuuugagtt

SEQ ID NO: 3728 - DNA, 21 bp, Artificial Sequence
  source: /note="Description of Artificial Sequence: Synthetic oligonucleotide"
  source: /note="Description of Combined DNA/RNA Molecule: Synthetic oligonucleotide"
cucaaagaaacgaucauactt

SEQ ID NO: 3729 - DNA, 21 bp, Artificial Sequence
  source: /note="Description of Artificial Sequence: Synthetic oligonucleotide"
  source: /note="Description of Combined DNA/RNA Molecule: Synthetic oligonucleotide"
uauccagauggucuucagatt

SEQ ID NO: 3730 - DNA, 21 bp, Artificial Sequence
  source: /note="Description of Artificial Sequence: Synthetic oligonucleotide"
  source: /note="Description of Combined DNA/RNA Molecule: Synthetic oligonucleotide"
ucugaagaccaucuggauatt

SEQ ID NO: 3731 - DNA, 21 bp, Artificial Sequence
  source: /note="Description of Artificial Sequence: Synthetic oligonucleotide"
  source: /note="Description of Combined DNA/RNA Molecule: Synthetic oligonucleotide"
uagugugaaaaccgauggatt

SEQ ID NO: 3732 - DNA, 21 bp, Artificial Sequence
  source: /note="Description of Artificial Sequence: Synthetic oligonucleotide"
  source: /note="Description of Combined DNA/RNA Molecule: Synthetic oligonucleotide"
uccaucgguuuucacacuatt

SEQ ID NO: 3733 - DNA, 21 bp, Artificial Sequence
  source: /note="Description of Artificial Sequence: Synthetic oligonucleotide"
  source: /note="Description of Combined DNA/RNA Molecule: Synthetic oligonucleotide"
uccccauggcagaugacuatt

SEQ ID NO: 3734 - DNA, 21 bp, Artificial Sequence
  source: /note="Description of Artificial Sequence: Synthetic oligonucleotide"
  source: /note="Description of Combined DNA/RNA Molecule: Synthetic oligonucleotide"
uagucaucugccauggggatt

SEQ ID NO: 3735 - DNA, 21 bp, Artificial Sequence
  source: /note="Description of Artificial Sequence: Synthetic oligonucleotide"
  source: /note="Description of Combined DNA/RNA Molecule: Synthetic oligonucleotide"
ccacugcagcaguacacuatt

SEQ ID NO: 3736 - DNA, 21 bp, Artificial Sequence
  source: /note="Description of Artificial Sequence: Synthetic oligonucleotide"
  source: /note="Description of Combined DNA/RNA Molecule: Synthetic oligonucleotide"
uaguguacugcugcaguggtt

SEQ ID NO: 3737 - DNA, 21 bp, Artificial Sequence
  source: /note="Description of Artificial Sequence: Synthetic oligonucleotide"
  source: /note="Description of Combined DNA/RNA Molecule: Synthetic oligonucleotide"
cugugaaccggcgagcacatt

SEQ ID NO: 3738 - DNA, 21 bp, Artificial Sequence
  source: /note="Description of Artificial Sequence: Synthetic oligonucleotide"
  source: /note="Description of Combined DNA/RNA Molecule: Synthetic oligonucleotide"
ugugcucgccgguucacagtt

SEQ ID NO: 3739 - DNA, 21 bp, Artificial Sequence
  source: /note="Description of Artificial Sequence: Synthetic oligonucleotide"
  source: /note="Description of Combined DNA/RNA Molecule: Synthetic oligonucleotide"
gguccuaugcugcuggcuutt

SEQ ID NO: 3740 - DNA, 21 bp, Artificial Sequence
  source: /note="Description of Artificial Sequence: Synthetic oligonucleotide"
  source: /note="Description of Combined DNA/RNA Molecule: Synthetic oligonucleotide"
aagccagcagcauaggacctt

SEQ ID NO: 3741 - DNA, 21 bp, Artificial Sequence
  source: /note="Description of Artificial Sequence: Synthetic oligonucleotide"
  source: /note="Description of Combined DNA/RNA Molecule: Synthetic oligonucleotide"
agccuuugguuguguuggatt

SEQ ID NO: 3742 - DNA, 21 bp, Artificial Sequence
  source: /note="Description of Artificial Sequence: Synthetic oligonucleotide"
  source: /note="Description of Combined DNA/RNA Molecule: Synthetic oligonucleotide"
uccaacacaaccaaaggcutt

SEQ ID NO: 3743 - DNA, 21 bp, Artificial Sequence
  source: /note="Description of Artificial Sequence: Synthetic oligonucleotide"
  source: /note="Description of Combined DNA/RNA Molecule: Synthetic oligonucleotide"
aauuccauguggacuuagatt

SEQ ID NO: 3744 - DNA, 21 bp, Artificial Sequence
  source: /note="Description of Artificial Sequence: Synthetic oligonucleotide"
  source: /note="Description of Combined DNA/RNA Molecule: Synthetic oligonucleotide"
ucuaaguccacauggaauutt

SEQ ID NO: 3745 - DNA, 21 bp, Artificial Sequence
  source: /note="Description of Artificial Sequence: Synthetic oligonucleotide"
  source: /note="Description of Combined DNA/RNA Molecule: Synthetic oligonucleotide"
ccagggcacugcaagcaaatt

SEQ ID NO: 3746 - DNA, 21 bp, Artificial Sequence
  source: /note="Description of Artificial Sequence: Synthetic oligonucleotide"
  source: /note="Description of Combined DNA/RNA Molecule: Synthetic oligonucleotide"
uuugcuugcagugcccuggtt

SEQ ID NO: 3747 - DNA, 21 bp, Artificial Sequence
  source: /note="Description of Artificial Sequence: Synthetic oligonucleotide"
  source: /note="Description of Combined DNA/RNA Molecule: Synthetic oligonucleotide"
cuuuucaguaugaucguuutt

SEQ ID NO: 3748 - DNA, 21 bp, Artificial Sequence
  source: /note="Description of Artificial Sequence: Synthetic oligonucleotide"
  source: /note="Description of Combined DNA/RNA Molecule: Synthetic oligonucleotide"
aaacgaucauacugaaaagtt

SEQ ID NO: 3749 - DNA, 21 bp, Artificial Sequence
  source: /note="Description of Artificial Sequence: Synthetic oligonucleotide"
  source: /note="Description of Combined DNA/RNA Molecule: Synthetic oligonucleotide"
gaaucagagaggcagcagutt

SEQ ID NO: 3750 - DNA, 21 bp, Artificial Sequence
  source: /note="Description of Artificial Sequence: Synthetic oligonucleotide"
  source: /note="Description of Combined DNA/RNA Molecule: Synthetic oligonucleotide"
acugcugccucucugauuctt

SEQ ID NO: 3751 - DNA, 21 bp, Artificial Sequence
  source: /note="Description of Artificial Sequence: Synthetic oligonucleotide"
  source: /note="Description of Combined DNA/RNA Molecule: Synthetic oligonucleotide"
gcaaagaucugaccccucatt

SEQ ID NO: 3752 - DNA, 21 bp, Artificial Sequence
  source: /note="Description of Artificial Sequence: Synthetic oligonucleotide"
  source: /note="Description of Combined DNA/RNA Molecule: Synthetic oligonucleotide"
ugaggggucagaucuuugctt

SEQ ID NO: 3753 - DNA, 21 bp, Artificial Sequence
  source: /note="Description of Artificial Sequence: Synthetic oligonucleotide"
  source: /note="Description of Combined DNA/RNA Molecule: Synthetic oligonucleotide"
ggagaagagcuccuacggatt

SEQ ID NO: 3754 - DNA, 21 bp, Artificial Sequence
  source: /note="Description of Artificial Sequence: Synthetic oligonucleotide"
  source: /note="Description of Combined DNA/RNA Molecule: Synthetic oligonucleotide"
uccguaggagcucuucucctt

SEQ ID NO: 3755 - DNA, 21 bp, Artificial Sequence
  source: /note="Description of Artificial Sequence: Synthetic oligonucleotide"
  source: /note="Description of Combined DNA/RNA Molecule: Synthetic oligonucleotide"
ccaugaguuuggagcaauctt

SEQ ID NO: 3756 - DNA, 21 bp, Artificial Sequence
  source: /note="Description of Artificial Sequence: Synthetic oligonucleotide"
  source: /note="Description of Combined DNA/RNA Molecule: Synthetic oligonucleotide"
gauugcuccaaacucauggtt

SEQ ID NO: 3757 - DNA, 21 bp, Artificial Sequence
  source: /note="Description of Artificial Sequence: Synthetic oligonucleotide"
  source: /note="Description of Combined DNA/RNA Molecule: Synthetic oligonucleotide"
cuuugagaaaaaaauugautt

SEQ ID NO: 3758 - DNA, 21 bp, Artificial Sequence
  source: /note="Description of Artificial Sequence: Synthetic oligonucleotide"
  source: /note="Description of Combined DNA/RNA Molecule: Synthetic oligonucleotide"
aucaauuuuuuucucaaagtt

SEQ ID NO: 3759 - DNA, 21 bp, Artificial Sequence
  source: /note="Description of Artificial Sequence: Synthetic oligonucleotide"
  source: /note="Description of Combined DNA/RNA Molecule: Synthetic oligonucleotide"
ugagcagacauaacaucuatt

SEQ ID NO: 3760 - DNA, 21 bp, Artificial Sequence
  source: /note="Description of Artificial Sequence: Synthetic oligonucleotide"
  source: /note="Description of Combined DNA/RNA Molecule: Synthetic oligonucleotide"
uagauguuaugucugcucatt

SEQ ID NO: 3761 - DNA, 21 bp, Artificial Sequence
  source: /note="Description of Artificial Sequence: Synthetic oligonucleotide"
  source: /note="Description of Combined DNA/RNA Molecule: Synthetic oligonucleotide"
cgugcaagcaaucaauuactt

SEQ ID NO: 3762 - DNA, 21 bp, Artificial Sequence
  source: /note="Description of Artificial Sequence: Synthetic oligonucleotide"
  source: /note="Description of Combined DNA/RNA Molecule: Synthetic oligonucleotide"
guaauugauugcuugcacgtt

SEQ ID NO: 3763 - DNA, 21 bp, Artificial Sequence
  source: /note="Description of Artificial Sequence: Synthetic oligonucleotide"
  source: /note="Description of Combined DNA/RNA Molecule: Synthetic oligonucleotide"
aaagcaaagaccagaaagatt

SEQ ID NO: 3764 - DNA, 21 bp, Artificial Sequence
  source: /note="Description of Artificial Sequence: Synthetic oligonucleotide"
  source: /note="Description of Combined DNA/RNA Molecule: Synthetic oligonucleotide"
ucuuucuggucuuugcuuutt

SEQ ID NO: 3765 - DNA, 21 bp, Artificial Sequence
  source: /note="Description of Artificial Sequence: Synthetic oligonucleotide"
  source: /note="Description of Combined DNA/RNA Molecule: Synthetic oligonucleotide"
ggaugugcaggaaaugaautt

SEQ ID NO: 3766 - DNA, 21 bp, Artificial Sequence
  source: /note="Description of Artificial Sequence: Synthetic oligonucleotide"
  source: /note="Description of Combined DNA/RNA Molecule: Synthetic oligonucleotide"
auucauuuccugcacaucctt

SEQ ID NO: 3767 - DNA, 21 bp, Artificial Sequence
  source: /note="Description of Artificial Sequence: Synthetic oligonucleotide"
  source: /note="Description of Combined DNA/RNA Molecule: Synthetic oligonucleotide"
cagcauacuuccugaacautt

SEQ ID NO: 3768 - DNA, 21 bp, Artificial Sequence
  source: /note="Description of Artificial Sequence: Synthetic oligonucleotide"
  source: /note="Description of Combined DNA/RNA Molecule: Synthetic oligonucleotide"
auguucaggaaguaugcugtt

SEQ ID NO: 3769 - DNA, 21 bp, Artificial Sequence
  source: /note="Description of Artificial Sequence: Synthetic oligonucleotide"
  source: /note="Description of Combined DNA/RNA Molecule: Synthetic oligonucleotide"
gcagcacagaugaaucagatt

SEQ ID NO: 3770 - DNA, 21 bp, Artificial Sequence
  source: /note="Description of Artificial Sequence: Synthetic oligonucleotide"
  source: /note="Description of Combined DNA/RNA Molecule: Synthetic oligonucleotide"
ucugauucaucugugcugctt

SEQ ID NO: 3771 - DNA, 21 bp, Artificial Sequence
  source: /note="Description of Artificial Sequence: Synthetic oligonucleotide"
  source: /note="Description of Combined DNA/RNA Molecule: Synthetic oligonucleotide"
ucuguuguucuaugcccaatt

SEQ ID NO: 3772 - DNA, 21 bp, Artificial Sequence
  source: /note="Description of Artificial Sequence: Synthetic oligonucleotide"
  source: /note="Description of Combined DNA/RNA Molecule: Synthetic oligonucleotide"
uugggcauagaacaacagatt

SEQ ID NO: 3773 - DNA, 21 bp, Artificial Sequence
  source: /note="Description of Artificial Sequence: Synthetic oligonucleotide"
  source: /note="Description of Combined DNA/RNA Molecule: Synthetic oligonucleotide"
ugagacagaugcuaauggatt

SEQ ID NO: 3774 - DNA, 21 bp, Artificial Sequence
  source: /note="Description of Artificial Sequence: Synthetic oligonucleotide"
  source: /note="Description of Combined DNA/RNA Molecule: Synthetic oligonucleotide"
uccauuagcaucugucucatt

SEQ ID NO: 3775 - DNA, 21 bp, Artificial Sequence
  source: /note="Description of Artificial Sequence: Synthetic oligonucleotide"
  source: /note="Description of Combined DNA/RNA Molecule: Synthetic oligonucleotide"
gccaaugacucaacccucutt

SEQ ID NO: 3776 - DNA, 21 bp, Artificial Sequence
  source: /note="Description of Artificial Sequence: Synthetic oligonucleotide"
  source: /note="Description of Combined DNA/RNA Molecule: Synthetic oligonucleotide"
agaggguugagucauuggctt

SEQ ID NO: 3777 - DNA, 21 bp, Artificial Sequence
  source: /note="Description of Artificial Sequence: Synthetic oligonucleotide"
  source: /note="Description of Combined DNA/RNA Molecule: Synthetic oligonucleotide"
gagugcaacuucugcaggatt

SEQ ID NO: 3778 - DNA, 21 bp, Artificial Sequence
  source: /note="Description of Artificial Sequence: Synthetic oligonucleotide"
  source: /note="Description of Combined DNA/RNA Molecule: Synthetic oligonucleotide"
uccugcagaaguugcacuctt

SEQ ID NO: 3779 - DNA, 21 bp, Artificial Sequence
  source: /note="Description of Artificial Sequence: Synthetic oligonucleotide"
  source: /note="Description of Combined DNA/RNA Molecule: Synthetic oligonucleotide"
gugaaagagagaaguccuatt

SEQ ID NO: 3780 - DNA, 21 bp, Artificial Sequence
  source: /note="Description of Artificial Sequence: Synthetic oligonucleotide"
  source: /note="Description of Combined DNA/RNA Molecule: Synthetic oligonucleotide"
uaggacuucucucuuucactt

SEQ ID NO: 3781 - DNA, 21 bp, Artificial Sequence
  source: /note="Description of Artificial Sequence: Synthetic oligonucleotide"
  source: /note="Description of Combined DNA/RNA Molecule: Synthetic oligonucleotide"
uaacuugccaaaaucuguutt

SEQ ID NO: 3782 - DNA, 21 bp, Artificial Sequence
  source: /note="Description of Artificial Sequence: Synthetic oligonucleotide"
  source: /note="Description of Combined DNA/RNA Molecule: Synthetic oligonucleotide"
aacagauuuuggcaaguuatt

SEQ ID NO: 3783 - DNA, 21 bp, Artificial Sequence
  source: /note="Description of Artificial Sequence: Synthetic oligonucleotide"
  source: /note="Description of Combined DNA/RNA Molecule: Synthetic oligonucleotide"
aagccagucuugagcuucatt

SEQ ID NO: 3784 - DNA, 21 bp, Artificial Sequence
  source: /note="Description of Artificial Sequence: Synthetic oligonucleotide"
  source: /note="Description of Combined DNA/RNA Molecule: Synthetic oligonucleotide"
ugaagcucaagacuggcuutt

SEQ ID NO: 3785 - DNA, 21 bp, Artificial Sequence
  source: /note="Description of Artificial Sequence: Synthetic oligonucleotide"
  source: /note="Description of Combined DNA/RNA Molecule: Synthetic oligonucleotide"
cacuuuucaguaugaucgutt

SEQ ID NO: 3786 - DNA, 21 bp, Artificial Sequence
  source: /note="Description of Artificial Sequence: Synthetic oligonucleotide"
  source: /note="Description of Combined DNA/RNA Molecule: Synthetic oligonucleotide"
acgaucauacugaaaagugtt

SEQ ID NO: 3787 - DNA, 21 bp, Artificial Sequence
  source: /note="Description of Artificial Sequence: Synthetic oligonucleotide"
  source: /note="Description of Combined DNA/RNA Molecule: Synthetic oligonucleotide"
gcagcagugucuucugcaatt

SEQ ID NO: 3788 - DNA, 21 bp, Artificial Sequence
  source: /note="Description of Artificial Sequence: Synthetic oligonucleotide"
  source: /note="Description of Combined DNA/RNA Molecule: Synthetic oligonucleotide"
uugcagaagacacugcugctt

SEQ ID NO: 3789 - DNA, 21 bp, Artificial Sequence
  source: /note="Description of Artificial Sequence: Synthetic oligonucleotide"
  source: /note="Description of Combined DNA/RNA Molecule: Synthetic oligonucleotide"
uccugaacauggagagugutt

SEQ ID NO: 3790 - DNA, 21 bp, Artificial Sequence
  source: /note="Description of Artificial Sequence: Synthetic oligonucleotide"
  source: /note="Description of Combined DNA/RNA Molecule: Synthetic oligonucleotide"
acacucuccauguucaggatt

SEQ ID NO: 3791 - DNA, 21 bp, Artificial Sequence
  source: /note="Description of Artificial Sequence: Synthetic oligonucleotide"
  source: /note="Description of Combined DNA/RNA Molecule: Synthetic oligonucleotide"
auuucuggaacacuuggcatt

SEQ ID NO: 3792 - DNA, 21 bp, Artificial Sequence
  source: /note="Description of Artificial Sequence: Synthetic oligonucleotide"
  source: /note="Description of Combined DNA/RNA Molecule: Synthetic oligonucleotide"
ugccaaguguuccagaaautt

SEQ ID NO: 3793 - DNA, 21 bp, Artificial Sequence
  source: /note="Description of Artificial Sequence: Synthetic oligonucleotide"
  source: /note="Description of Combined DNA/RNA Molecule: Synthetic oligonucleotide"
caguacacuaccaacagautt

SEQ ID NO: 3794 - DNA, 21 bp, Artificial Sequence
  source: /note="Description of Artificial Sequence: Synthetic oligonucleotide"
  source: /note="Description of Combined DNA/RNA Molecule: Synthetic oligonucleotide"
aucuguugguaguguacugtt

SEQ ID NO: 3795 - DNA, 21 bp, Artificial Sequence
  source: /note="Description of Artificial Sequence: Synthetic oligonucleotide"
  source: /note="Description of Combined DNA/RNA Molecule: Synthetic oligonucleotide"
gcaugaccucaauuauuuctt

SEQ ID NO: 3796 - DNA, 21 bp, Artificial Sequence
  source: /note="Description of Artificial Sequence: Synthetic oligonucleotide"
  source: /note="Description of Combined DNA/RNA Molecule: Synthetic oligonucleotide"
gaaauaauugaggucaugctt

SEQ ID NO: 3797 - DNA, 21 bp, Artificial Sequence
  source: /note="Description of Artificial Sequence: Synthetic oligonucleotide"
  source: /note="Description of Combined DNA/RNA Molecule: Synthetic oligonucleotide"
agaacugcugcaaagaucutt

SEQ ID NO: 3798 - DNA, 21 bp, Artificial Sequence
  source: /note="Description of Artificial Sequence: Synthetic oligonucleotide"
  source: /note="Description of Combined DNA/RNA Molecule: Synthetic oligonucleotide"
agaucuuugcagcaguucutt

SEQ ID NO: 3799 - DNA, 21 bp, Artificial Sequence
  source: /note="Description of Artificial Sequence: Synthetic oligonucleotide"
  source: /note="Description of Combined DNA/RNA Molecule: Synthetic oligonucleotide"
caccccagaugaugaacuatt

SEQ ID NO: 3800 - DNA, 21 bp, Artificial Sequence
  source: /note="Description of Artificial Sequence: Synthetic oligonucleotide"
  source: /note="Description of Combined DNA/RNA Molecule: Synthetic oligonucleotide"
uaguucaucaucuggggugtt

SEQ ID NO: 3801 - DNA, 21 bp, Artificial Sequence
  source: /note="Description of Artificial Sequence: Synthetic oligonucleotide"
  source: /note="Description of Combined DNA/RNA Molecule: Synthetic oligonucleotide"
gauccaagggauucgaaactt

SEQ ID NO: 3802 - DNA, 21 bp, Artificial Sequence
  source: /note="Description of Artificial Sequence: Synthetic oligonucleotide"
  source: /note="Description of Combined DNA/RNA Molecule: Synthetic oligonucleotide"
guuucgaaucccuuggauctt

SEQ ID NO: 3803 - DNA, 21 bp, Artificial Sequence
  source: /note="Description of Artificial Sequence: Synthetic oligonucleotide"
  source: /note="Description of Combined DNA/RNA Molecule: Synthetic oligonucleotide"
cucaucaccaaaaagcaagtt

SEQ ID NO: 3804 - DNA, 21 bp, Artificial Sequence
  source: /note="Description of Artificial Sequence: Synthetic oligonucleotide"
  source: /note="Description of Combined DNA/RNA Molecule: Synthetic oligonucleotide"
cuugcuuuuuggugaugagtt

SEQ ID NO: 3805 - DNA, 21 bp, Artificial Sequence
  source: /note="Description of Artificial Sequence: Synthetic oligonucleotide"
  source: /note="Description of Combined DNA/RNA Molecule: Synthetic oligonucleotide"
acaacauggugcuggggcatt

SEQ ID NO: 3806 - DNA, 21 bp, Artificial Sequence
  source: /note="Description of Artificial Sequence: Synthetic oligonucleotide"
  source: /note="Description of Combined DNA/RNA Molecule: Synthetic oligonucleotide"
ugccccagcaccauguugutt

SEQ ID NO: 3807 - DNA, 21 bp, Artificial Sequence
  source: /note="Description of Artificial Sequence: Synthetic oligonucleotide"
  source: /note="Description of Combined DNA/RNA Molecule: Synthetic oligonucleotide"
gaucguuucuuugagaaaatt

SEQ ID NO: 3808 - DNA, 21 bp, Artificial Sequence
  source: /note="Description of Artificial Sequence: Synthetic oligonucleotide"
  source: /note="Description of Combined DNA/RNA Molecule: Synthetic oligonucleotide"
uuuucucaaagaaacgauctt

SEQ ID NO: 3809 - DNA, 21 bp, Artificial Sequence
  source: /note="Description of Artificial Sequence: Synthetic oligonucleotide"
  source: /note="Description of Combined DNA/RNA Molecule: Synthetic oligonucleotide"
cagcacgaguucucugauutt

SEQ ID NO: 3810 - DNA, 21 bp, Artificial Sequence
  source: /note="Description of Artificial Sequence: Synthetic oligonucleotide"
  source: /note="Description of Combined DNA/RNA Molecule: Synthetic oligonucleotide"
aaucagagaacucgugcugtt

SEQ ID NO: 3811 - DNA, 21 bp, Artificial Sequence
  source: /note="Description of Artificial Sequence: Synthetic oligonucleotide"
  source: /note="Description of Combined DNA/RNA Molecule: Synthetic oligonucleotide"
aaugaugucagccaccucatt

SEQ ID NO: 3812 - DNA, 21 bp, Artificial Sequence
  source: /note="Description of Artificial Sequence: Synthetic oligonucleotide"
  source: /note="Description of Combined DNA/RNA Molecule: Synthetic oligonucleotide"
ugagguggcugacaucauutt

SEQ ID NO: 3813 - DNA, 21 bp, Artificial Sequence
  source: /note="Description of Artificial Sequence: Synthetic oligonucleotide"
  source: /note="Description of Combined DNA/RNA Molecule: Synthetic oligonucleotide"
aguuauggacacuuugaaatt

SEQ ID NO: 3814 - DNA, 21 bp, Artificial Sequence
  source: /note="Description of Artificial Sequence: Synthetic oligonucleotide"
  source: /note="Description of Combined DNA/RNA Molecule: Synthetic oligonucleotide"
uuucaaaguguccauaacutt

SEQ ID NO: 3815 - DNA, 21 bp, Artificial Sequence
  source: /note="Description of Artificial Sequence: Synthetic oligonucleotide"
  source: /note="Description of Combined DNA/RNA Molecule: Synthetic oligonucleotide"
gaugaugaacuacuuccuutt

SEQ ID NO: 3816 - DNA, 21 bp, Artificial Sequence
  source: /note="Description of Artificial Sequence: Synthetic oligonucleotide"
  source: /note="Description of Combined DNA/RNA Molecule: Synthetic oligonucleotide"
aaggaaguaguucaucauctt

SEQ ID NO: 3817 - DNA, 21 bp, Artificial Sequence
  source: /note="Description of Artificial Sequence: Synthetic oligonucleotide"
  source: /note="Description of Combined DNA/RNA Molecule: Synthetic oligonucleotide"
gcaggaaaugaaugccgugtt

SEQ ID NO: 3818 - DNA, 21 bp, Artificial Sequence
  source: /note="Description of Artificial Sequence: Synthetic oligonucleotide"
  source: /note="Description of Combined DNA/RNA Molecule: Synthetic oligonucleotide"
cacggcauucauuuccugctt

SEQ ID NO: 3819 - DNA, 21 bp, Artificial Sequence
  source: /note="Description of Artificial Sequence: Synthetic oligonucleotide"
  source: /note="Description of Combined DNA/RNA Molecule: Synthetic oligonucleotide"
ucuucaagauaacuugccatt

SEQ ID NO: 3820 - DNA, 21 bp, Artificial Sequence
  source: /note="Description of Artificial Sequence: Synthetic oligonucleotide"
  source: /note="Description of Combined DNA/RNA Molecule: Synthetic oligonucleotide"
uggcaaguuaucuugaagatt

SEQ ID NO: 3821 - DNA, 21 bp, Artificial Sequence
  source: /note="Description of Artificial Sequence: Synthetic oligonucleotide"
  source: /note="Description of Combined DNA/RNA Molecule: Synthetic oligonucleotide"
cgauggaggggaucccagutt

SEQ ID NO: 3822 - DNA, 21 bp, Artificial Sequence
  source: /note="Description of Artificial Sequence: Synthetic oligonucleotide"
  source: /note="Description of Combined DNA/RNA Molecule: Synthetic oligonucleotide"
acugggauccccuccaucgtt

SEQ ID NO: 3823 - DNA, 21 bp, Artificial Sequence
  source: /note="Description of Artificial Sequence: Synthetic oligonucleotide"
  source: /note="Description of Combined DNA/RNA Molecule: Synthetic oligonucleotide"
ccaaaaagcaagugucagutt

SEQ ID NO: 3824 - DNA, 21 bp, Artificial Sequence
  source: /note="Description of Artificial Sequence: Synthetic oligonucleotide"
  source: /note="Description of Combined DNA/RNA Molecule: Synthetic oligonucleotide"
acugacacuugcuuuuuggtt

SEQ ID NO: 3825 - DNA, 21 bp, Artificial Sequence
  source: /note="Description of Artificial Sequence: Synthetic oligonucleotide"
  source: /note="Description of Combined DNA/RNA Molecule: Synthetic oligonucleotide"
gauuggggaucgggauggatt

SEQ ID NO: 3826 - DNA, 21 bp, Artificial Sequence
  source: /note="Description of Artificial Sequence: Synthetic oligonucleotide"
  source: /note="Description of Combined DNA/RNA Molecule: Synthetic oligonucleotide"
uccaucccgauccccaauctt

SEQ ID NO: 3827 - DNA, 21 bp, Artificial Sequence
  source: /note="Description of Artificial Sequence: Synthetic oligonucleotide"
  source: /note="Description of Combined DNA/RNA Molecule: Synthetic oligonucleotide"
cccuggagucugugcggautt

SEQ ID NO: 3828 - DNA, 21 bp, Artificial Sequence
  source: /note="Description of Artificial Sequence: Synthetic oligonucleotide"
  source: /note="Description of Combined DNA/RNA Molecule: Synthetic oligonucleotide"
auccgcacagacuccagggtt

SEQ ID NO: 3829 - DNA, 21 bp, Artificial Sequence
  source: /note="Description of Artificial Sequence: Synthetic oligonucleotide"
  source: /note="Description of Combined DNA/RNA Molecule: Synthetic oligonucleotide"
guugucuuuauaugugaautt

SEQ ID NO: 3830 - DNA, 21 bp, Artificial Sequence
  source: /note="Description of Artificial Sequence: Synthetic oligonucleotide"
  source: /note="Description of Combined DNA/RNA Molecule: Synthetic oligonucleotide"
auucacauauaaagacaactt

SEQ ID NO: 3831 - DNA, 21 bp, Artificial Sequence
  source: /note="Description of Artificial Sequence: Synthetic oligonucleotide"
  source: /note="Description of Combined DNA/RNA Molecule: Synthetic oligonucleotide"
cgggcauuguccacugcagtt

SEQ ID NO: 3832 - DNA, 21 bp, Artificial Sequence
  source: /note="Description of Artificial Sequence: Synthetic oligonucleotide"
  source: /note="Description of Combined DNA/RNA Molecule: Synthetic oligonucleotide"
cugcaguggacaaugcccgtt

SEQ ID NO: 3833 - DNA, 21 bp, Artificial Sequence
  source: /note="Description of Artificial Sequence: Synthetic oligonucleotide"
  source: /note="Description of Combined DNA/RNA Molecule: Synthetic oligonucleotide"
uauucagacucccucaucatt

SEQ ID NO: 3834 - DNA, 21 bp, Artificial Sequence
  source: /note="Description of Artificial Sequence: Synthetic oligonucleotide"
  source: /note="Description of Combined DNA/RNA Molecule: Synthetic oligonucleotide"
ugaugagggagucugaauatt

SEQ ID NO: 3835 - DNA, 21 bp, Artificial Sequence
  source: /note="Description of Artificial Sequence: Synthetic oligonucleotide"
  source: /note="Description of Combined DNA/RNA Molecule: Synthetic oligonucleotide"
cacugcauuuugaagugautt

SEQ ID NO: 3836 - DNA, 21 bp, Artificial Sequence
  source: /note="Description of Artificial Sequence: Synthetic oligonucleotide"
  source: /note="Description of Combined DNA/RNA Molecule: Synthetic oligonucleotide"
aucacuucaaaaugcagugtt

SEQ ID NO: 3837 - DNA, 21 bp, Artificial Sequence
  source: /note="Description of Artificial Sequence: Synthetic oligonucleotide"
  source: /note="Description of Combined DNA/RNA Molecule: Synthetic oligonucleotide"
ccagaaagagugucucauctt

SEQ ID NO: 3838 - DNA, 21 bp, Artificial Sequence
  source: /note="Description of Artificial Sequence: Synthetic oligonucleotide"
  source: /note="Description of Combined DNA/RNA Molecule: Synthetic oligonucleotide"
gaugagacacucuuucuggtt

SEQ ID NO: 3839 - DNA, 21 bp, Artificial Sequence
  source: /note="Description of Artificial Sequence: Synthetic oligonucleotide"
  source: /note="Description of Combined DNA/RNA Molecule: Synthetic oligonucleotide"
aggcggagggauuggggautt

SEQ ID NO: 3840 - DNA, 21 bp, Artificial Sequence
  source: /note="Description of Artificial Sequence: Synthetic oligonucleotide"
  source: /note="Description of Combined DNA/RNA Molecule: Synthetic oligonucleotide"
auccccaaucccuccgccutt

SEQ ID NO: 3841 - DNA, 21 bp, Artificial Sequence
  source: /note="Description of Artificial Sequence: Synthetic oligonucleotide"
  source: /note="Description of Combined DNA/RNA Molecule: Synthetic oligonucleotide"
agaccuccaugggaaagautt

SEQ ID NO: 3842 - DNA, 21 bp, Artificial Sequence
  source: /note="Description of Artificial Sequence: Synthetic oligonucleotide"
  source: /note="Description of Combined DNA/RNA Molecule: Synthetic oligonucleotide"
aucuuucccauggaggucutt

SEQ ID NO: 3843 - DNA, 21 bp, Artificial Sequence
  source: /note="Description of Artificial Sequence: Synthetic oligonucleotide"
  source: /note="Description of Combined DNA/RNA Molecule: Synthetic oligonucleotide"
gcaggaggccacugcauuutt

SEQ ID NO: 3844 - DNA, 21 bp, Artificial Sequence
  source: /note="Description of Artificial Sequence: Synthetic oligonucleotide"
  source: /note="Description of Combined DNA/RNA Molecule: Synthetic oligonucleotide"
aaaugcaguggccuccugctt

SEQ ID NO: 3845 - DNA, 21 bp, Artificial Sequence
  source: /note="Description of Artificial Sequence: Synthetic oligonucleotide"
  source: /note="Description of Combined DNA/RNA Molecule: Synthetic oligonucleotide"
aucuguuuccacuuuucagtt

SEQ ID NO: 3846 - DNA, 21 bp, Artificial Sequence
  source: /note="Description of Artificial Sequence: Synthetic oligonucleotide"
  source: /note="Description of Combined DNA/RNA Molecule: Synthetic oligonucleotide"
cugaaaaguggaaacagautt

SEQ ID NO: 3847 - DNA, 21 bp, Artificial Sequence
  source: /note="Description of Artificial Sequence: Synthetic oligonucleotide"
  source: /note="Description of Combined DNA/RNA Molecule: Synthetic oligonucleotide"
agagaaguccuauuucucatt

SEQ ID NO: 3848 - DNA, 21 bp, Artificial Sequence
  source: /note="Description of Artificial Sequence: Synthetic oligonucleotide"
  source: /note="Description of Combined DNA/RNA Molecule: Synthetic oligonucleotide"
ugagaaauaggacuucucutt

SEQ ID NO: 3849 - DNA, 21 bp, Artificial Sequence
  source: /note="Description of Artificial Sequence: Synthetic oligonucleotide"
  source: /note="Description of Combined DNA/RNA Molecule: Synthetic oligonucleotide"
gucuucagaguugucuuuatt

SEQ ID NO: 3850 - DNA, 21 bp, Artificial Sequence
  source: /note="Description of Artificial Sequence: Synthetic oligonucleotide"
  source: /note="Description of Combined DNA/RNA Molecule: Synthetic oligonucleotide"
uaaagacaacucugaagactt

SEQ ID NO: 3851 - DNA, 21 bp, Artificial Sequence
  source: /note="Description of Artificial Sequence: Synthetic oligonucleotide"
  source: /note="Description of Combined DNA/RNA Molecule: Synthetic oligonucleotide"
ggcuggaacugaagccucatt

SEQ ID NO: 3852 - DNA, 21 bp, Artificial Sequence
  source: /note="Description of Artificial Sequence: Synthetic oligonucleotide"
  source: /note="Description of Combined DNA/RNA Molecule: Synthetic oligonucleotide"
ugaggcuucaguuccagcctt

SEQ ID NO: 3853 - DNA, 21 bp, Artificial Sequence
  source: /note="Description of Artificial Sequence: Synthetic oligonucleotide"
  source: /note="Description of Combined DNA/RNA Molecule: Synthetic oligonucleotide"
gccauuaucauauccagautt

SEQ ID NO: 3854 - DNA, 21 bp, Artificial Sequence
  source: /note="Description of Artificial Sequence: Synthetic oligonucleotide"
  source: /note="Description of Combined DNA/RNA Molecule: Synthetic oligonucleotide"
aucuggauaugauaauggctt

SEQ ID NO: 3855 - DNA, 21 bp, Artificial Sequence
  source: /note="Description of Artificial Sequence: Synthetic oligonucleotide"
  source: /note="Description of Combined DNA/RNA Molecule: Synthetic oligonucleotide"
agcaggccccagugugguutt

SEQ ID NO: 3856 - DNA, 21 bp, Artificial Sequence
  source: /note="Description of Artificial Sequence: Synthetic oligonucleotide"
  source: /note="Description of Combined DNA/RNA Molecule: Synthetic oligonucleotide"
aaccacacuggggccugcutt

SEQ ID NO: 3857 - DNA, 21 bp, Artificial Sequence
  source: /note="Description of Artificial Sequence: Synthetic oligonucleotide"
  source: /note="Description of Combined DNA/RNA Molecule: Synthetic oligonucleotide"
ucagcugagugcaacuucutt

SEQ ID NO: 3858 - DNA, 21 bp, Artificial Sequence
  source: /note="Description of Artificial Sequence: Synthetic oligonucleotide"
  source: /note="Description of Combined DNA/RNA Molecule: Synthetic oligonucleotide"
agaaguugcacucagcugatt

SEQ ID NO: 3859 - DNA, 21 bp, Artificial Sequence
  source: /note="Description of Artificial Sequence: Synthetic oligonucleotide"
  source: /note="Description of Combined DNA/RNA Molecule: Synthetic oligonucleotide"
gagcacacaucuuccccautt

SEQ ID NO: 3860 - DNA, 21 bp, Artificial Sequence
  source: /note="Description of Artificial Sequence: Synthetic oligonucleotide"
  source: /note="Description of Combined DNA/RNA Molecule: Synthetic oligonucleotide"
auggggaagaugugugcuctt

SEQ ID NO: 3861 - DNA, 21 bp, Artificial Sequence
  source: /note="Description of Artificial Sequence: Synthetic oligonucleotide"
  source: /note="Description of Combined DNA/RNA Molecule: Synthetic oligonucleotide"
acuuccaggacaucaugcatt

SEQ ID NO: 3862 - DNA, 21 bp, Artificial Sequence
  source: /note="Description of Artificial Sequence: Synthetic oligonucleotide"
  source: /note="Description of Combined DNA/RNA Molecule: Synthetic oligonucleotide"
ugcaugauguccuggaagutt

SEQ ID NO: 3863 - DNA, 21 bp, Artificial Sequence
  source: /note="Description of Artificial Sequence: Synthetic oligonucleotide"
  source: /note="Description of Combined DNA/RNA Molecule: Synthetic oligonucleotide"
ccuaucgaguuuuuaaaactt

SEQ ID NO: 3864 - DNA, 21 bp, Artificial Sequence
  source: /note="Description of Artificial Sequence: Synthetic oligonucleotide"
  source: /note="Description of Combined DNA/RNA Molecule: Synthetic oligonucleotide"
guuuuaaaaacucgauaggtt

SEQ ID NO: 3865 - DNA, 21 bp, Artificial Sequence
  source: /note="Description of Artificial Sequence: Synthetic oligonucleotide"
  source: /note="Description of Combined DNA/RNA Molecule: Synthetic oligonucleotide"
cuuccuugagaaucugcuatt

SEQ ID NO: 3866 - DNA, 21 bp, Artificial Sequence
  source: /note="Description of Artificial Sequence: Synthetic oligonucleotide"
  source: /note="Description of Combined DNA/RNA Molecule: Synthetic oligonucleotide"
uagcagauucucaaggaagtt

SEQ ID NO: 3867 - DNA, 21 bp, Artificial Sequence
  source: /note="Description of Artificial Sequence: Synthetic oligonucleotide"
  source: /note="Description of Combined DNA/RNA Molecule: Synthetic oligonucleotide"
accaacagaucaaagaaactt

SEQ ID NO: 3868 - DNA, 21 bp, Artificial Sequence
  source: /note="Description of Artificial Sequence: Synthetic oligonucleotide"
  source: /note="Description of Combined DNA/RNA Molecule: Synthetic oligonucleotide"
guuucuuugaucuguuggutt

SEQ ID NO: 3869 - DNA, 21 bp, Artificial Sequence
  source: /note="Description of Artificial Sequence: Synthetic oligonucleotide"
  source: /note="Description of Combined DNA/RNA Molecule: Synthetic oligonucleotide"
uaaccccaggccauuaucatt

SEQ ID NO: 3870 - DNA, 21 bp, Artificial Sequence
  source: /note="Description of Artificial Sequence: Synthetic oligonucleotide"
  source: /note="Description of Combined DNA/RNA Molecule: Synthetic oligonucleotide"
ugauaauggccugggguuatt

SEQ ID NO: 3871 - DNA, 21 bp, Artificial Sequence
  source: /note="Description of Artificial Sequence: Synthetic oligonucleotide"
  source: /note="Description of Combined DNA/RNA Molecule: Synthetic oligonucleotide"
ccaugccuccaugauccaatt

SEQ ID NO: 3872 - DNA, 21 bp, Artificial Sequence
  source: /note="Description of Artificial Sequence: Synthetic oligonucleotide"
  source: /note="Description of Combined DNA/RNA Molecule: Synthetic oligonucleotide"
uuggaucauggaggcauggtt

SEQ ID NO: 3873 - DNA, 21 bp, Artificial Sequence
  source: /note="Description of Artificial Sequence: Synthetic oligonucleotide"
  source: /note="Description of Combined DNA/RNA Molecule: Synthetic oligonucleotide"
ugaugaacuaaugagcagatt

SEQ ID NO: 3874 - DNA, 21 bp, Artificial Sequence
  source: /note="Description of Artificial Sequence: Synthetic oligonucleotide"
  source: /note="Description of Combined DNA/RNA Molecule: Synthetic oligonucleotide"
ucugcucauuaguucaucatt

SEQ ID NO: 3875 - DNA, 21 bp, Artificial Sequence
  source: /note="Description of Artificial Sequence: Synthetic oligonucleotide"
  source: /note="Description of Combined DNA/RNA Molecule: Synthetic oligonucleotide"
ccugaagagcgcugagggatt

SEQ ID NO: 3876 - DNA, 21 bp, Artificial Sequence
  source: /note="Description of Artificial Sequence: Synthetic oligonucleotide"
  source: /note="Description of Combined DNA/RNA Molecule: Synthetic oligonucleotide"
ucccucagcgcucuucaggtt

SEQ ID NO: 3877 - DNA, 21 bp, Artificial Sequence
  source: /note="Description of Artificial Sequence: Synthetic oligonucleotide"
  source: /note="Description of Combined DNA/RNA Molecule: Synthetic oligonucleotide"
aacacuuggcaaagccuuutt

SEQ ID NO: 3878 - DNA, 21 bp, Artificial Sequence
  source: /note="Description of Artificial Sequence: Synthetic oligonucleotide"
  source: /note="Description of Combined DNA/RNA Molecule: Synthetic oligonucleotide"
aaaggcuuugccaaguguutt

SEQ ID NO: 3879 - DNA, 21 bp, Artificial Sequence
  source: /note="Description of Artificial Sequence: Synthetic oligonucleotide"
  source: /note="Description of Combined DNA/RNA Molecule: Synthetic oligonucleotide"
ucugcagaaagcaggcaaatt

SEQ ID NO: 3880 - DNA, 21 bp, Artificial Sequence
  source: /note="Description of Artificial Sequence: Synthetic oligonucleotide"
  source: /note="Description of Combined DNA/RNA Molecule: Synthetic oligonucleotide"
uuugccugcuuucugcagatt

SEQ ID NO: 3881 - DNA, 21 bp, Artificial Sequence
  source: /note="Description of Artificial Sequence: Synthetic oligonucleotide"
  source: /note="Description of Combined DNA/RNA Molecule: Synthetic oligonucleotide"
ccggccucccuguuguccatt

SEQ ID NO: 3882 - DNA, 21 bp, Artificial Sequence
  source: /note="Description of Artificial Sequence: Synthetic oligonucleotide"
  source: /note="Description of Combined DNA/RNA Molecule: Synthetic oligonucleotide"
uggacaacagggaggccggtt

SEQ ID NO: 3883 - DNA, 21 bp, Artificial Sequence
  source: /note="Description of Artificial Sequence: Synthetic oligonucleotide"
  source: /note="Description of Combined DNA/RNA Molecule: Synthetic oligonucleotide"
caucaucccugugcggguutt

SEQ ID NO: 3884 - DNA, 21 bp, Artificial Sequence
  source: /note="Description of Artificial Sequence: Synthetic oligonucleotide"
  source: /note="Description of Combined DNA/RNA Molecule: Synthetic oligonucleotide"
aacccgcacagggaugaugtt

SEQ ID NO: 3885 - DNA, 21 bp, Artificial Sequence
  source: /note="Description of Artificial Sequence: Synthetic oligonucleotide"
  source: /note="Description of Combined DNA/RNA Molecule: Synthetic oligonucleotide"
ugugcggguugcagaugcutt

SEQ ID NO: 3886 - DNA, 21 bp, Artificial Sequence
  source: /note="Description of Artificial Sequence: Synthetic oligonucleotide"
  source: /note="Description of Combined DNA/RNA Molecule: Synthetic oligonucleotide"
agcaucugcaacccgcacatt

SEQ ID NO: 3887 - DNA, 21 bp, Artificial Sequence
  source: /note="Description of Artificial Sequence: Synthetic oligonucleotide"
  source: /note="Description of Combined DNA/RNA Molecule: Synthetic oligonucleotide"
ggaaagagguugcugaaactt

SEQ ID NO: 3888 - DNA, 21 bp, Artificial Sequence
  source: /note="Description of Artificial Sequence: Synthetic oligonucleotide"
  source: /note="Description of Combined DNA/RNA Molecule: Synthetic oligonucleotide"
guuucagcaaccucuuucctt

SEQ ID NO: 3889 - DNA, 21 bp, Artificial Sequence
  source: /note="Description of Artificial Sequence: Synthetic oligonucleotide"
  source: /note="Description of Combined DNA/RNA Molecule: Synthetic oligonucleotide"
agguccacgcaguggggcutt

SEQ ID NO: 3890 - DNA, 21 bp, Artificial Sequence
  source: /note="Description of Artificial Sequence: Synthetic oligonucleotide"
  source: /note="Description of Combined DNA/RNA Molecule: Synthetic oligonucleotide"
agccccacugcguggaccutt

SEQ ID NO: 3891 - DNA, 21 bp, Artificial Sequence
  source: /note="Description of Artificial Sequence: Synthetic oligonucleotide"
  source: /note="Description of Combined DNA/RNA Molecule: Synthetic oligonucleotide"
ugccgugaggaaagagguutt

SEQ ID NO: 3892 - DNA, 21 bp, Artificial Sequence
  source: /note="Description of Artificial Sequence: Synthetic oligonucleotide"
  source: /note="Description of Combined DNA/RNA Molecule: Synthetic oligonucleotide"
aaccucuuuccucacggcatt

SEQ ID NO: 3893 - DNA, 21 bp, Artificial Sequence
  source: /note="Description of Artificial Sequence: Synthetic oligonucleotide"
  source: /note="Description of Combined DNA/RNA Molecule: Synthetic oligonucleotide"
gcuaauggaugccggccuctt

SEQ ID NO: 3894 - DNA, 21 bp, Artificial Sequence
  source: /note="Description of Artificial Sequence: Synthetic oligonucleotide"
  source: /note="Description of Combined DNA/RNA Molecule: Synthetic oligonucleotide"
gaggccggcauccauuagctt

SEQ ID NO: 3895 - DNA, 21 bp, Artificial Sequence
  source: /note="Description of Artificial Sequence: Synthetic oligonucleotide"
  source: /note="Description of Combined DNA/RNA Molecule: Synthetic oligonucleotide"
gaagcaaguggggcuggaatt

SEQ ID NO: 3896 - DNA, 21 bp, Artificial Sequence
  source: /note="Description of Artificial Sequence: Synthetic oligonucleotide"
  source: /note="Description of Combined DNA/RNA Molecule: Synthetic oligonucleotide"
uuccagccccacuugcuuctt

SEQ ID NO: 3897 - DNA, 21 bp, Artificial Sequence
  source: /note="Description of Artificial Sequence: Synthetic oligonucleotide"
  source: /note="Description of Combined DNA/RNA Molecule: Synthetic oligonucleotide"
caucuuccgccacaaugautt

SEQ ID NO: 3898 - DNA, 21 bp, Artificial Sequence
  source: /note="Description of Artificial Sequence: Synthetic oligonucleotide"
  source: /note="Description of Combined DNA/RNA Molecule: Synthetic oligonucleotide"
aucauuguggcggaagaugtt

SEQ ID NO: 3899 - DNA, 21 bp, Artificial Sequence
  source: /note="Description of Artificial Sequence: Synthetic oligonucleotide"
  source: /note="Description of Combined DNA/RNA Molecule: Synthetic oligonucleotide"
auuucucaggcuugagcaatt

SEQ ID NO: 3900 - DNA, 21 bp, Artificial Sequence
  source: /note="Description of Artificial Sequence: Synthetic oligonucleotide"
  source: /note="Description of Combined DNA/RNA Molecule: Synthetic oligonucleotide"
uugcucaagccugagaaautt

SEQ ID NO: 3901 - DNA, 21 bp, Artificial Sequence
  source: /note="Description of Artificial Sequence: Synthetic oligonucleotide"
  source: /note="Description of Combined DNA/RNA Molecule: Synthetic oligonucleotide"
cccgagucccccaggccuutt

SEQ ID NO: 3902 - DNA, 21 bp, Artificial Sequence
  source: /note="Description of Artificial Sequence: Synthetic oligonucleotide"
  source: /note="Description of Combined DNA/RNA Molecule: Synthetic oligonucleotide"
aaggccugggggacucgggtt

SEQ ID NO: 3903 - DNA, 21 bp, Artificial Sequence
  source: /note="Description of Artificial Sequence: Synthetic oligonucleotide"
  source: /note="Description of Combined DNA/RNA Molecule: Synthetic oligonucleotide"
caagcaaaugcccuuuccutt

SEQ ID NO: 3904 - DNA, 21 bp, Artificial Sequence
  source: /note="Description of Artificial Sequence: Synthetic oligonucleotide"
  source: /note="Description of Combined DNA/RNA Molecule: Synthetic oligonucleotide"
aggaaagggcauuugcuugtt

SEQ ID NO: 3905 - DNA, 21 bp, Artificial Sequence
  source: /note="Description of Artificial Sequence: Synthetic oligonucleotide"
  source: /note="Description of Combined DNA/RNA Molecule: Synthetic oligonucleotide"
ccccucaguccccaagauutt

SEQ ID NO: 3906 - DNA, 21 bp, Artificial Sequence
  source: /note="Description of Artificial Sequence: Synthetic oligonucleotide"
  source: /note="Description of Combined DNA/RNA Molecule: Synthetic oligonucleotide"
aaucuuggggacugaggggtt

SEQ ID NO: 3907 - DNA, 21 bp, Artificial Sequence
  source: /note="Description of Artificial Sequence: Synthetic oligonucleotide"
  source: /note="Description of Combined DNA/RNA Molecule: Synthetic oligonucleotide"
cuacggugccccggggagatt

SEQ ID NO: 3908 - DNA, 21 bp, Artificial Sequence
  source: /note="Description of Artificial Sequence: Synthetic oligonucleotide"
  source: /note="Description of Combined DNA/RNA Molecule: Synthetic oligonucleotide"
ucuccccggggcaccguagtt

SEQ ID NO: 3909 - DNA, 21 bp, Artificial Sequence
  source: /note="Description of Artificial Sequence: Synthetic oligonucleotide"
  source: /note="Description of Combined DNA/RNA Molecule: Synthetic oligonucleotide"
aaaacugccccaagaugautt

SEQ ID NO: 3910 - DNA, 21 bp, Artificial Sequence
  source: /note="Description of Artificial Sequence: Synthetic oligonucleotide"
  source: /note="Description of Combined DNA/RNA Molecule: Synthetic oligonucleotide"
aucaucuuggggcaguuuutt

SEQ ID NO: 3911 - DNA, 21 bp, Artificial Sequence
  source: /note="Description of Artificial Sequence: Synthetic oligonucleotide"
  source: /note="Description of Combined DNA/RNA Molecule: Synthetic oligonucleotide"
acaaaacugcuaaggccaatt

SEQ ID NO: 3912 - DNA, 21 bp, Artificial Sequence
  source: /note="Description of Artificial Sequence: Synthetic oligonucleotide"
  source: /note="Description of Combined DNA/RNA Molecule: Synthetic oligonucleotide"
uuggccuuagcaguuuugutt

SEQ ID NO: 3913 - DNA, 21 bp, Artificial Sequence
  source: /note="Description of Artificial Sequence: Synthetic oligonucleotide"
  source: /note="Description of Combined DNA/RNA Molecule: Synthetic oligonucleotide"
gauucugggaaccaugccutt

SEQ ID NO: 3914 - DNA, 21 bp, Artificial Sequence
  source: /note="Description of Artificial Sequence: Synthetic oligonucleotide"
  source: /note="Description of Combined DNA/RNA Molecule: Synthetic oligonucleotide"
aggcaugguucccagaauctt

SEQ ID NO: 3915 - DNA, 21 bp, Artificial Sequence
  source: /note="Description of Artificial Sequence: Synthetic oligonucleotide"
  source: /note="Description of Combined DNA/RNA Molecule: Synthetic oligonucleotide"
ccagauggcacacagcuuctt

SEQ ID NO: 3916 - DNA, 21 bp, Artificial Sequence
  source: /note="Description of Artificial Sequence: Synthetic oligonucleotide"
  source: /note="Description of Combined DNA/RNA Molecule: Synthetic oligonucleotide"
gaagcugugugccaucuggtt

SEQ ID NO: 3917 - DNA, 21 bp, Artificial Sequence
  source: /note="Description of Artificial Sequence: Synthetic oligonucleotide"
  source: /note="Description of Combined DNA/RNA Molecule: Synthetic oligonucleotide"
agggauucgaaacagccgatt

SEQ ID NO: 3918 - DNA, 21 bp, Artificial Sequence
  source: /note="Description of Artificial Sequence: Synthetic oligonucleotide"
  source: /note="Description of Combined DNA/RNA Molecule: Synthetic oligonucleotide"
ucggcuguuucgaaucccutt

SEQ ID NO: 3919 - DNA, 21 bp, Artificial Sequence
  source: /note="Description of Artificial Sequence: Synthetic oligonucleotide"
  source: /note="Description of Combined DNA/RNA Molecule: Synthetic oligonucleotide"
cucugcaguccucagcgcatt

SEQ ID NO: 3920 - DNA, 21 bp, Artificial Sequence
  source: /note="Description of Artificial Sequence: Synthetic oligonucleotide"
  source: /note="Description of Combined DNA/RNA Molecule: Synthetic oligonucleotide"
ugcgcugaggacugcagagtt

SEQ ID NO: 3921 - DNA, 21 bp, Artificial Sequence
  source: /note="Description of Artificial Sequence: Synthetic oligonucleotide"
  source: /note="Description of Combined DNA/RNA Molecule: Synthetic oligonucleotide"
ccgccgccucugcaguccutt

SEQ ID NO: 3922 - DNA, 21 bp, Artificial Sequence
  source: /note="Description of Artificial Sequence: Synthetic oligonucleotide"
  source: /note="Description of Combined DNA/RNA Molecule: Synthetic oligonucleotide"
aggacugcagaggcggcggtt

SEQ ID NO: 3923 - DNA, 21 bp, Artificial Sequence
  source: /note="Description of Artificial Sequence: Synthetic oligonucleotide"
  source: /note="Description of Combined DNA/RNA Molecule: Synthetic oligonucleotide"
cuggcuggagcccuggagutt

SEQ ID NO: 3924 - DNA, 21 bp, Artificial Sequence
  source: /note="Description of Artificial Sequence: Synthetic oligonucleotide"
  source: /note="Description of Combined DNA/RNA Molecule: Synthetic oligonucleotide"
acuccagggcuccagccagtt

SEQ ID NO: 3925 - DNA, 21 bp, Artificial Sequence
  source: /note="Description of Artificial Sequence: Synthetic oligonucleotide"
  source: /note="Description of Combined DNA/RNA Molecule: Synthetic oligonucleotide"
gacaucaugcaaaagcaaatt

SEQ ID NO: 3926 - DNA, 21 bp, Artificial Sequence
  source: /note="Description of Artificial Sequence: Synthetic oligonucleotide"
  source: /note="Description of Combined DNA/RNA Molecule: Synthetic oligonucleotide"
uuugcuuuugcaugauguctt

SEQ ID NO: 3927 - DNA, 21 bp, Artificial Sequence
  source: /note="Description of Artificial Sequence: Synthetic oligonucleotide"
  source: /note="Description of Combined DNA/RNA Molecule: Synthetic oligonucleotide"
gcuugagcaaguugguauctt

SEQ ID NO: 3928 - DNA, 21 bp, Artificial Sequence
  source: /note="Description of Artificial Sequence: Synthetic oligonucleotide"
  source: /note="Description of Combined DNA/RNA Molecule: Synthetic oligonucleotide"
gauaccaacuugcucaagctt

SEQ ID NO: 3929 - DNA, 21 bp, Artificial Sequence
  source: /note="Description of Artificial Sequence: Synthetic oligonucleotide"
  source: /note="Description of Combined DNA/RNA Molecule: Synthetic oligonucleotide"
caggcugugagauuuacuctt

SEQ ID NO: 3930 - DNA, 21 bp, Artificial Sequence
  source: /note="Description of Artificial Sequence: Synthetic oligonucleotide"
  source: /note="Description of Combined DNA/RNA Molecule: Synthetic oligonucleotide"
gaguaaaucucacagccugtt

SEQ ID NO: 3931 - DNA, 21 bp, Artificial Sequence
  source: /note="Description of Artificial Sequence: Synthetic oligonucleotide"
  source: /note="Description of Combined DNA/RNA Molecule: Synthetic oligonucleotide"
agagcugugugauguggcctt

SEQ ID NO: 3932 - DNA, 21 bp, Artificial Sequence
  source: /note="Description of Artificial Sequence: Synthetic oligonucleotide"
  source: /note="Description of Combined DNA/RNA Molecule: Synthetic oligonucleotide"
ggccacaucacacagcucutt

SEQ ID NO: 3933 - DNA, 21 bp, Artificial Sequence
  source: /note="Description of Artificial Sequence: Synthetic oligonucleotide"
  source: /note="Description of Combined DNA/RNA Molecule: Synthetic oligonucleotide"
ggagcuggcagaccuccautt

SEQ ID NO: 3934 - DNA, 21 bp, Artificial Sequence
  source: /note="Description of Artificial Sequence: Synthetic oligonucleotide"
  source: /note="Description of Combined DNA/RNA Molecule: Synthetic oligonucleotide"
auggaggucugccagcucctt

SEQ ID NO: 3935 - DNA, 21 bp, Artificial Sequence
  source: /note="Description of Artificial Sequence: Synthetic oligonucleotide"
  source: /note="Description of Combined DNA/RNA Molecule: Synthetic oligonucleotide"
aucccaguggacugcugaatt

SEQ ID NO: 3936 - DNA, 21 bp, Artificial Sequence
  source: /note="Description of Artificial Sequence: Synthetic oligonucleotide"
  source: /note="Description of Combined DNA/RNA Molecule: Synthetic oligonucleotide"
uucagcaguccacugggautt

SEQ ID NO: 3937 - DNA, 21 bp, Artificial Sequence
  source: /note="Description of Artificial Sequence: Synthetic oligonucleotide"
  source: /note="Description of Combined DNA/RNA Molecule: Synthetic oligonucleotide"
gucaaacucaugagacagatt

SEQ ID NO: 3938 - DNA, 21 bp, Artificial Sequence
  source: /note="Description of Artificial Sequence: Synthetic oligonucleotide"
  source: /note="Description of Combined DNA/RNA Molecule: Synthetic oligonucleotide"
ucugucucaugaguuugactt

SEQ ID NO: 3939 - DNA, 21 bp, Artificial Sequence
  source: /note="Description of Artificial Sequence: Synthetic oligonucleotide"
  source: /note="Description of Combined DNA/RNA Molecule: Synthetic oligonucleotide"
cuuuccuggcagcacagautt

SEQ ID NO: 3940 - DNA, 21 bp, Artificial Sequence
  source: /note="Description of Artificial Sequence: Synthetic oligonucleotide"
  source: /note="Description of Combined DNA/RNA Molecule: Synthetic oligonucleotide"
aucugugcugccaggaaagtt

SEQ ID NO: 3941 - DNA, 21 bp, Artificial Sequence
  source: /note="Description of Artificial Sequence: Synthetic oligonucleotide"
  source: /note="Description of Combined DNA/RNA Molecule: Synthetic oligonucleotide"
cccuccggccagugagaaatt

SEQ ID NO: 3942 - DNA, 21 bp, Artificial Sequence
  source: /note="Description of Artificial Sequence: Synthetic oligonucleotide"
  source: /note="Description of Combined DNA/RNA Molecule: Synthetic oligonucleotide"
uuucucacuggccggagggtt

SEQ ID NO: 3943 - DNA, 21 bp, Artificial Sequence
  source: /note="Description of Artificial Sequence: Synthetic oligonucleotide"
  source: /note="Description of Combined DNA/RNA Molecule: Synthetic oligonucleotide"
cuaccuaggaaugagucgctt

SEQ ID NO: 3944 - DNA, 21 bp, Artificial Sequence
  source: /note="Description of Artificial Sequence: Synthetic oligonucleotide"
  source: /note="Description of Combined DNA/RNA Molecule: Synthetic oligonucleotide"
gcgacucauuccuagguagtt

SEQ ID NO: 3945 - DNA, 21 bp, Artificial Sequence
  source: /note="Description of Artificial Sequence: Synthetic oligonucleotide"
  source: /note="Description of Combined DNA/RNA Molecule: Synthetic oligonucleotide"
cccaagauuguggcauuugtt

SEQ ID NO: 3946 - DNA, 21 bp, Artificial Sequence
  source: /note="Description of Artificial Sequence: Synthetic oligonucleotide"
  source: /note="Description of Combined DNA/RNA Molecule: Synthetic oligonucleotide"
caaaugccacaaucuugggtt

SEQ ID NO: 3947 - DNA, 21 bp, Artificial Sequence
  source: /note="Description of Artificial Sequence: Synthetic oligonucleotide"
  source: /note="Description of Combined DNA/RNA Molecule: Synthetic oligonucleotide"
gagcaaucaccuucguggatt

SEQ ID NO: 3948 - DNA, 21 bp, Artificial Sequence
  source: /note="Description of Artificial Sequence: Synthetic oligonucleotide"
  source: /note="Description of Combined DNA/RNA Molecule: Synthetic oligonucleotide"
uccacgaaggugauugcuctt

SEQ ID NO: 3949 - DNA, 21 bp, Artificial Sequence
  source: /note="Description of Artificial Sequence: Synthetic oligonucleotide"
  source: /note="Description of Combined DNA/RNA Molecule: Synthetic oligonucleotide"
ugcccauucuuaucccgagtt

SEQ ID NO: 3950 - DNA, 21 bp, Artificial Sequence
  source: /note="Description of Artificial Sequence: Synthetic oligonucleotide"
  source: /note="Description of Combined DNA/RNA Molecule: Synthetic oligonucleotide"
cucgggauaagaaugggcatt

SEQ ID NO: 3951 - DNA, 21 bp, Artificial Sequence
  source: /note="Description of Artificial Sequence: Synthetic oligonucleotide"
  source: /note="Description of Combined DNA/RNA Molecule: Synthetic oligonucleotide"
aaggccaagguccaacagatt

SEQ ID NO: 3952 - DNA, 21 bp, Artificial Sequence
  source: /note="Description of Artificial Sequence: Synthetic oligonucleotide"
  source: /note="Description of Combined DNA/RNA Molecule: Synthetic oligonucleotide"
ucuguuggaccuuggccuutt

SEQ ID NO: 3953 - DNA, 21 bp, Artificial Sequence
  source: /note="Description of Artificial Sequence: Synthetic oligonucleotide"
  source: /note="Description of Combined DNA/RNA Molecule: Synthetic oligonucleotide"
cacacagcuuccgucuggatt

SEQ ID NO: 3954 - DNA, 21 bp, Artificial Sequence
  source: /note="Description of Artificial Sequence: Synthetic oligonucleotide"
  source: /note="Description of Combined DNA/RNA Molecule: Synthetic oligonucleotide"
uccagacggaagcugugugtt

SEQ ID NO: 3955 - DNA, 21 bp, Artificial Sequence
  source: /note="Description of Artificial Sequence: Synthetic oligonucleotide"
  source: /note="Description of Combined DNA/RNA Molecule: Synthetic oligonucleotide"
uuauggggcucgaggcggatt

SEQ ID NO: 3956 - DNA, 21 bp, Artificial Sequence
  source: /note="Description of Artificial Sequence: Synthetic oligonucleotide"
  source: /note="Description of Combined DNA/RNA Molecule: Synthetic oligonucleotide"
uccgccucgagccccauaatt

SEQ ID NO: 3957 - DNA, 21 bp, Artificial Sequence
  source: /note="Description of Artificial Sequence: Synthetic oligonucleotide"
  source: /note="Description of Combined DNA/RNA Molecule: Synthetic oligonucleotide"
ugucuucugcaaagccagutt

SEQ ID NO: 3958 - DNA, 21 bp, Artificial Sequence
  source: /note="Description of Artificial Sequence: Synthetic oligonucleotide"
  source: /note="Description of Combined DNA/RNA Molecule: Synthetic oligonucleotide"
acuggcuuugcagaagacatt

SEQ ID NO: 3959 - DNA, 21 bp, Artificial Sequence
  source: /note="Description of Artificial Sequence: Synthetic oligonucleotide"
  source: /note="Description of Combined DNA/RNA Molecule: Synthetic oligonucleotide"
aggccugagcaugaccucatt

SEQ ID NO: 3960 - DNA, 21 bp, Artificial Sequence
  source: /note="Description of Artificial Sequence: Synthetic oligonucleotide"
  source: /note="Description of Combined DNA/RNA Molecule: Synthetic oligonucleotide"
ugaggucaugcucaggccutt

SEQ ID NO: 3961 - DNA, 21 bp, Artificial Sequence
  source: /note="Description of Artificial Sequence: Synthetic oligonucleotide"
  source: /note="Description of Combined DNA/RNA Molecule: Synthetic oligonucleotide"
augugaauuaaguuauauutt

SEQ ID NO: 3962 - DNA, 21 bp, Artificial Sequence
  source: /note="Description of Artificial Sequence: Synthetic oligonucleotide"
  source: /note="Description of Combined DNA/RNA Molecule: Synthetic oligonucleotide"
aauauaacuuaauucacautt

SEQ ID NO: 3963 - DNA, 21 bp, Artificial Sequence
  source: /note="Description of Artificial Sequence: Synthetic oligonucleotide"
  source: /note="Description of Combined DNA/RNA Molecule: Synthetic oligonucleotide"
acugcugaagaacuuccagtt

SEQ ID NO: 3964 - DNA, 21 bp, Artificial Sequence
  source: /note="Description of Artificial Sequence: Synthetic oligonucleotide"
  source: /note="Description of Combined DNA/RNA Molecule: Synthetic oligonucleotide"
cuggaaguucuucagcagutt

SEQ ID NO: 3965 - DNA, 21 bp, Artificial Sequence
  source: /note="Description of Artificial Sequence: Synthetic oligonucleotide"
  source: /note="Description of Combined DNA/RNA Molecule: Synthetic oligonucleotide"
ugagaaagacaaaacugcutt

SEQ ID NO: 3966 - DNA, 21 bp, Artificial Sequence
  source: /note="Description of Artificial Sequence: Synthetic oligonucleotide"
  source: /note="Description of Combined DNA/RNA Molecule: Synthetic oligonucleotide"
agcaguuuugucuuucucatt

SEQ ID NO: 3967 - DNA, 21 bp, Artificial Sequence
  source: /note="Description of Artificial Sequence: Synthetic oligonucleotide"
  source: /note="Description of Combined DNA/RNA Molecule: Synthetic oligonucleotide"
ucagccaccucagagaacutt

SEQ ID NO: 3968 - DNA, 21 bp, Artificial Sequence
  source: /note="Description of Artificial Sequence: Synthetic oligonucleotide"
  source: /note="Description of Combined DNA/RNA Molecule: Synthetic oligonucleotide"
aguucucugagguggcugatt

SEQ ID NO: 3969 - DNA, 21 bp, Artificial Sequence
  source: /note="Description of Artificial Sequence: Synthetic oligonucleotide"
  source: /note="Description of Combined DNA/RNA Molecule: Synthetic oligonucleotide"
ggcaacgagcguuucguuutt

SEQ ID NO: 3970 - DNA, 21 bp, Artificial Sequence
  source: /note="Description of Artificial Sequence: Synthetic oligonucleotide"
  source: /note="Description of Combined DNA/RNA Molecule: Synthetic oligonucleotide"
aaacgaaacgcucguugcctt

SEQ ID NO: 3971 - DNA, 21 bp, Artificial Sequence
  source: /note="Description of Artificial Sequence: Synthetic oligonucleotide"
  source: /note="Description of Combined DNA/RNA Molecule: Synthetic oligonucleotide"
ccugauggaucccagcagatt

SEQ ID NO: 3972 - DNA, 21 bp, Artificial Sequence
  source: /note="Description of Artificial Sequence: Synthetic oligonucleotide"
  source: /note="Description of Combined DNA/RNA Molecule: Synthetic oligonucleotide"
ucugcugggauccaucaggtt

SEQ ID NO: 3973 - DNA, 21 bp, Artificial Sequence
  source: /note="Description of Artificial Sequence: Synthetic oligonucleotide"
  source: /note="Description of Combined DNA/RNA Molecule: Synthetic oligonucleotide"
ugugcccacuggaagagcutt

SEQ ID NO: 3974 - DNA, 21 bp, Artificial Sequence
  source: /note="Description of Artificial Sequence: Synthetic oligonucleotide"
  source: /note="Description of Combined DNA/RNA Molecule: Synthetic oligonucleotide"
agcucuuccagugggcacatt

SEQ ID NO: 3975 - DNA, 21 bp, Artificial Sequence
  source: /note="Description of Artificial Sequence: Synthetic oligonucleotide"
  source: /note="Description of Combined DNA/RNA Molecule: Synthetic oligonucleotide"
ccacaggagccagcauacutt

SEQ ID NO: 3976 - DNA, 21 bp, Artificial Sequence
  source: /note="Description of Artificial Sequence: Synthetic oligonucleotide"
  source: /note="Description of Combined DNA/RNA Molecule: Synthetic oligonucleotide"
aguaugcuggcuccuguggtt

SEQ ID NO: 3977 - DNA, 21 bp, Artificial Sequence
  source: /note="Description of Artificial Sequence: Synthetic oligonucleotide"
  source: /note="Description of Combined DNA/RNA Molecule: Synthetic oligonucleotide"
gugguacuagaaauauuuctt

SEQ ID NO: 3978 - DNA, 21 bp, Artificial Sequence
  source: /note="Description of Artificial Sequence: Synthetic oligonucleotide"
  source: /note="Description of Combined DNA/RNA Molecule: Synthetic oligonucleotide"
gaaauauuucuaguaccactt

SEQ ID NO: 3979 - DNA, 21 bp, Artificial Sequence
  source: /note="Description of Artificial Sequence: Synthetic oligonucleotide"
  source: /note="Description of Combined DNA/RNA Molecule: Synthetic oligonucleotide"
uucgccgcugcccauucuutt

SEQ ID NO: 3980 - DNA, 21 bp, Artificial Sequence
  source: /note="Description of Artificial Sequence: Synthetic oligonucleotide"
  source: /note="Description of Combined DNA/RNA Molecule: Synthetic oligonucleotide"
aagaaugggcagcggcgaatt

SEQ ID NO: 3981 - DNA, 21 bp, Artificial Sequence
  source: /note="Description of Artificial Sequence: Synthetic oligonucleotide"
  source: /note="Description of Combined DNA/RNA Molecule: Synthetic oligonucleotide"
ccgccagcaccagcgcaactt

SEQ ID NO: 3982 - DNA, 21 bp, Artificial Sequence
  source: /note="Description of Artificial Sequence: Synthetic oligonucleotide"
  source: /note="Description of Combined DNA/RNA Molecule: Synthetic oligonucleotide"
guugcgcuggugcuggcggtt

SEQ ID NO: 3983 - DNA, 21 bp, Artificial Sequence
  source: /note="Description of Artificial Sequence: Synthetic oligonucleotide"
  source: /note="Description of Combined DNA/RNA Molecule: Synthetic oligonucleotide"
cgcugagggacgggugcuutt

SEQ ID NO: 3984 - DNA, 21 bp, Artificial Sequence
  source: /note="Description of Artificial Sequence: Synthetic oligonucleotide"
  source: /note="Description of Combined DNA/RNA Molecule: Synthetic oligonucleotide"
aagcacccgucccucagcgtt

SEQ ID NO: 3985 - DNA, 21 bp, Artificial Sequence
  source: /note="Description of Artificial Sequence: Synthetic oligonucleotide"
  source: /note="Description of Combined DNA/RNA Molecule: Synthetic oligonucleotide"
uggacuucucgacuugagutt

SEQ ID NO: 3986 - DNA, 21 bp, Artificial Sequence
  source: /note="Description of Artificial Sequence: Synthetic oligonucleotide"
  source: /note="Description of Combined DNA/RNA Molecule: Synthetic oligonucleotide"
acucaagucgagaaguccatt

SEQ ID NO: 3987 - DNA, 21 bp, Artificial Sequence
  source: /note="Description of Artificial Sequence: Synthetic oligonucleotide"
  source: /note="Description of Combined DNA/RNA Molecule: Synthetic oligonucleotide"
aaagaaaccccuccggccatt

SEQ ID NO: 3988 - DNA, 21 bp, Artificial Sequence
  source: /note="Description of Artificial Sequence: Synthetic oligonucleotide"
  source: /note="Description of Combined DNA/RNA Molecule: Synthetic oligonucleotide"
uggccggagggguuucuuutt

SEQ ID NO: 3989 - DNA, 21 bp, Artificial Sequence
  source: /note="Description of Artificial Sequence: Synthetic oligonucleotide"
  source: /note="Description of Combined DNA/RNA Molecule: Synthetic oligonucleotide"
uugacaccguacgguccuatt

SEQ ID NO: 3990 - DNA, 21 bp, Artificial Sequence
  source: /note="Description of Artificial Sequence: Synthetic oligonucleotide"
  source: /note="Description of Combined DNA/RNA Molecule: Synthetic oligonucleotide"
uaggaccguacggugucaatt

SEQ ID NO: 3991 - DNA, 21 bp, Artificial Sequence
  source: /note="Description of Artificial Sequence: Synthetic oligonucleotide"
  source: /note="Description of Combined DNA/RNA Molecule: Synthetic oligonucleotide"
cccucuucacccuggcuaatt

SEQ ID NO: 3992 - DNA, 21 bp, Artificial Sequence
  source: /note="Description of Artificial Sequence: Synthetic oligonucleotide"
  source: /note="Description of Combined DNA/RNA Molecule: Synthetic oligonucleotide"
uuagccagggugaagagggtt

SEQ ID NO: 3993 - DNA, 21 bp, Artificial Sequence
  source: /note="Description of Artificial Sequence: Synthetic oligonucleotide"
  source: /note="Description of Combined DNA/RNA Molecule: Synthetic oligonucleotide"
cccccaggccuuucugcagtt

SEQ ID NO: 3994 - DNA, 21 bp, Artificial Sequence
  source: /note="Description of Artificial Sequence: Synthetic oligonucleotide"
  source: /note="Description of Combined DNA/RNA Molecule: Synthetic oligonucleotide"
cugcagaaaggccugggggtt

SEQ ID NO: 3995 - DNA, 21 bp, Artificial Sequence
  source: /note="Description of Artificial Sequence: Synthetic oligonucleotide"
  source: /note="Description of Combined DNA/RNA Molecule: Synthetic oligonucleotide"
augcccaaaacugccccaatt

SEQ ID NO: 3996 - DNA, 21 bp, Artificial Sequence
  source: /note="Description of Artificial Sequence: Synthetic oligonucleotide"
  source: /note="Description of Combined DNA/RNA Molecule: Synthetic oligonucleotide"
uuggggcaguuuugggcautt

SEQ ID NO: 3997 - DNA, 21 bp, Artificial Sequence
  source: /note="Description of Artificial Sequence: Synthetic oligonucleotide"
  source: /note="Description of Combined DNA/RNA Molecule: Synthetic oligonucleotide"
cuugagugcccgccuccuutt

SEQ ID NO: 3998 - DNA, 21 bp, Artificial Sequence
  source: /note="Description of Artificial Sequence: Synthetic oligonucleotide"
  source: /note="Description of Combined DNA/RNA Molecule: Synthetic oligonucleotide"
aaggaggcgggcacucaagtt

SEQ ID NO: 3999 - DNA, 21 bp, Artificial Sequence
  source: /note="Description of Artificial Sequence: Synthetic oligonucleotide"
  source: /note="Description of Combined DNA/RNA Molecule: Synthetic oligonucleotide"
ggguacaucgccagcacgatt

SEQ ID NO: 4000 - DNA, 21 bp, Artificial Sequence
  source: /note="Description of Artificial Sequence: Synthetic oligonucleotide"
  source: /note="Description of Combined DNA/RNA Molecule: Synthetic oligonucleotide"
ucgugcuggcgauguaccctt

SEQ ID NO: 4001 - DNA, 21 bp, Artificial Sequence
  source: /note="Description of Artificial Sequence: Synthetic oligonucleotide"
  source: /note="Description of Combined DNA/RNA Molecule: Synthetic oligonucleotide"
guguggggcaguuauggactt

SEQ ID NO: 4002 - DNA, 21 bp, Artificial Sequence
  source: /note="Description of Artificial Sequence: Synthetic oligonucleotide"
  source: /note="Description of Combined DNA/RNA Molecule: Synthetic oligonucleotide"
guccauaacugccccacactt

SEQ ID NO: 4003 - DNA, 21 bp, Artificial Sequence
  source: /note="Description of Artificial Sequence: Synthetic oligonucleotide"
  source: /note="Description of Combined DNA/RNA Molecule: Synthetic oligonucleotide"
acauaguccuggaaauaaatt

SEQ ID NO: 4004 - DNA, 21 bp, Artificial Sequence
  source: /note="Description of Artificial Sequence: Synthetic oligonucleotide"
  source: /note="Description of Combined DNA/RNA Molecule: Synthetic oligonucleotide"
uuuauuuccaggacuaugutt

SEQ ID NO: 4005 - DNA, 21 bp, Artificial Sequence
  source: /note="Description of Artificial Sequence: Synthetic oligonucleotide"
  source: /note="Description of Combined DNA/RNA Molecule: Synthetic oligonucleotide"
aucccagcagaguccagautt

SEQ ID NO: 4006 - DNA, 21 bp, Artificial Sequence
  source: /note="Description of Artificial Sequence: Synthetic oligonucleotide"
  source: /note="Description of Combined DNA/RNA Molecule: Synthetic oligonucleotide"
aucuggacucugcugggautt

SEQ ID NO: 4007 - DNA, 21 bp, Artificial Sequence
  source: /note="Description of Artificial Sequence: Synthetic oligonucleotide"
  source: /note="Description of Combined DNA/RNA Molecule: Synthetic oligonucleotide"
cuagauucuuuccacaggatt

SEQ ID NO: 4008 - DNA, 21 bp, Artificial Sequence
  source: /note="Description of Artificial Sequence: Synthetic oligonucleotide"
  source: /note="Description of Combined DNA/RNA Molecule: Synthetic oligonucleotide"
uccuguggaaagaaucuagtt

SEQ ID NO: 4009 - DNA, 21 bp, Artificial Sequence
  source: /note="Description of Artificial Sequence: Synthetic oligonucleotide"
  source: /note="Description of Combined DNA/RNA Molecule: Synthetic oligonucleotide"
uuguuuuccucgugcuuugtt

SEQ ID NO: 4010 - DNA, 21 bp, Artificial Sequence
  source: /note="Description of Artificial Sequence: Synthetic oligonucleotide"
  source: /note="Description of Combined DNA/RNA Molecule: Synthetic oligonucleotide"
caaagcacgaggaaaacaatt

SEQ ID NO: 4011 - DNA, 21 bp, Artificial Sequence
  source: /note="Description of Artificial Sequence: Synthetic oligonucleotide"
  source: /note="Description of Combined DNA/RNA Molecule: Synthetic oligonucleotide"
ccuccuucgccgccgccuctt

SEQ ID NO: 4012 - DNA, 21 bp, Artificial Sequence
  source: /note="Description of Artificial Sequence: Synthetic oligonucleotide"
  source: /note="Description of Combined DNA/RNA Molecule: Synthetic oligonucleotide"
gaggcggcggcgaaggaggtt

SEQ ID NO: 4013 - DNA, 21 bp, Artificial Sequence
  source: /note="Description of Artificial Sequence: Synthetic oligonucleotide"
  source: /note="Description of Combined DNA/RNA Molecule: Synthetic oligonucleotide"
ugaggcugcucccggacaatt

SEQ ID NO: 4014 - DNA, 21 bp, Artificial Sequence
  source: /note="Description of Artificial Sequence: Synthetic oligonucleotide"
  source: /note="Description of Combined DNA/RNA Molecule: Synthetic oligonucleotide"
uuguccgggagcagccucatt

SEQ ID NO: 4015 - DNA, 21 bp, Artificial Sequence
  source: /note="Description of Artificial Sequence: Synthetic oligonucleotide"
  source: /note="Description of Combined DNA/RNA Molecule: Synthetic oligonucleotide"
ccaacagacuccugauggatt

SEQ ID NO: 4016 - DNA, 21 bp, Artificial Sequence
  source: /note="Description of Artificial Sequence: Synthetic oligonucleotide"
  source: /note="Description of Combined DNA/RNA Molecule: Synthetic oligonucleotide"
uccaucaggagucuguuggtt

SEQ ID NO: 4017 - DNA, 21 bp, Artificial Sequence
  source: /note="Description of Artificial Sequence: Synthetic oligonucleotide"
  source: /note="Description of Combined DNA/RNA Molecule: Synthetic oligonucleotide"
ucacauggaagcaagugggtt

SEQ ID NO: 4018 - DNA, 21 bp, Artificial Sequence
  source: /note="Description of Artificial Sequence: Synthetic oligonucleotide"
  source: /note="Description of Combined DNA/RNA Molecule: Synthetic oligonucleotide"
cccacuugcuuccaugugatt

SEQ ID NO: 4019 - DNA, 21 bp, Artificial Sequence
  source: /note="Description of Artificial Sequence: Synthetic oligonucleotide"
  source: /note="Description of Combined DNA/RNA Molecule: Synthetic oligonucleotide"
cauucaauggauggggcggtt

SEQ ID NO: 4020 - DNA, 21 bp, Artificial Sequence
  source: /note="Description of Artificial Sequence: Synthetic oligonucleotide"
  source: /note="Description of Combined DNA/RNA Molecule: Synthetic oligonucleotide"
ccgccccauccauugaaugtt

SEQ ID NO: 4021 - DNA, 21 bp, Artificial Sequence
  source: /note="Description of Artificial Sequence: Synthetic oligonucleotide"
  source: /note="Description of Combined DNA/RNA Molecule: Synthetic oligonucleotide"
aggaaugagucgccacccatt

SEQ ID NO: 4022 - DNA, 21 bp, Artificial Sequence
  source: /note="Description of Artificial Sequence: Synthetic oligonucleotide"
  source: /note="Description of Combined DNA/RNA Molecule: Synthetic oligonucleotide"
uggguggcgacucauuccutt

SEQ ID NO: 4023 - DNA, 21 bp, Artificial Sequence
  source: /note="Description of Artificial Sequence: Synthetic oligonucleotide"
  source: /note="Description of Combined DNA/RNA Molecule: Synthetic oligonucleotide"
uggacuuagagcgggagcutt

SEQ ID NO: 4024 - DNA, 21 bp, Artificial Sequence
  source: /note="Description of Artificial Sequence: Synthetic oligonucleotide"
  source: /note="Description of Combined DNA/RNA Molecule: Synthetic oligonucleotide"
agcucccgcucuaaguccatt

SEQ ID NO: 4025 - DNA, 21 bp, Artificial Sequence
  source: /note="Description of Artificial Sequence: Synthetic oligonucleotide"
  source: /note="Description of Combined DNA/RNA Molecule: Synthetic oligonucleotide"
cuaaaaacacagaagucugtt

SEQ ID NO: 4026 - DNA, 21 bp, Artificial Sequence
  source: /note="Description of Artificial Sequence: Synthetic oligonucleotide"
  source: /note="Description of Combined DNA/RNA Molecule: Synthetic oligonucleotide"
cagacuucuguguuuuuagtt

SEQ ID NO: 4027 - DNA, 21 bp, Artificial Sequence
  source: /note="Description of Artificial Sequence: Synthetic oligonucleotide"
  source: /note="Description of Combined DNA/RNA Molecule: Synthetic oligonucleotide"
cccucaccacacaccccagtt

SEQ ID NO: 4028 - DNA, 21 bp, Artificial Sequence
  source: /note="Description of Artificial Sequence: Synthetic oligonucleotide"
  source: /note="Description of Combined DNA/RNA Molecule: Synthetic oligonucleotide"
cugggguguguggugagggtt

SEQ ID NO: 4029 - DNA, 21 bp, Artificial Sequence
  source: /note="Description of Artificial Sequence: Synthetic oligonucleotide"
  source: /note="Description of Combined DNA/RNA Molecule: Synthetic oligonucleotide"
aauccuugcuucagggacutt

SEQ ID NO: 4030 - DNA, 21 bp, Artificial Sequence
  source: /note="Description of Artificial Sequence: Synthetic oligonucleotide"
  source: /note="Description of Combined DNA/RNA Molecule: Synthetic oligonucleotide"
agucccugaagcaaggauutt

SEQ ID NO: 4031 - DNA, 21 bp, Artificial Sequence
  source: /note="Description of Artificial Sequence: Synthetic oligonucleotide"
  source: /note="Description of Combined DNA/RNA Molecule: Synthetic oligonucleotide"
uuguggcauuugaaacugutt

SEQ ID NO: 4032 - DNA, 21 bp, Artificial Sequence
  source: /note="Description of Artificial Sequence: Synthetic oligonucleotide"
  source: /note="Description of Combined DNA/RNA Molecule: Synthetic oligonucleotide"
acaguuucaaaugccacaatt

SEQ ID NO: 4033 - DNA, 21 bp, Artificial Sequence
  source: /note="Description of Artificial Sequence: Synthetic oligonucleotide"
  source: /note="Description of Combined DNA/RNA Molecule: Synthetic oligonucleotide"
ucaauuacccuacggugcctt

SEQ ID NO: 4034 - DNA, 21 bp, Artificial Sequence
  source: /note="Description of Artificial Sequence: Synthetic oligonucleotide"
  source: /note="Description of Combined DNA/RNA Molecule: Synthetic oligonucleotide"
ggcaccguaggguaauugatt

SEQ ID NO: 4035 - DNA, 21 bp, Artificial Sequence
  source: /note="Description of Artificial Sequence: Synthetic oligonucleotide"
  source: /note="Description of Combined DNA/RNA Molecule: Synthetic oligonucleotide"
caagccagccccucgggcatt

SEQ ID NO: 4036 - DNA, 21 bp, Artificial Sequence
  source: /note="Description of Artificial Sequence: Synthetic oligonucleotide"
  source: /note="Description of Combined DNA/RNA Molecule: Synthetic oligonucleotide"
ugcccgaggggcuggcuugtt

SEQ ID NO: 4037 - DNA, 21 bp, Artificial Sequence
  source: /note="Description of Artificial Sequence: Synthetic oligonucleotide"
  source: /note="Description of Combined DNA/RNA Molecule: Synthetic oligonucleotide"
gagucuucccugccuggautt

SEQ ID NO: 4038 - DNA, 21 bp, Artificial Sequence
  source: /note="Description of Artificial Sequence: Synthetic oligonucleotide"
  source: /note="Description of Combined DNA/RNA Molecule: Synthetic oligonucleotide"
auccaggcagggaagacuctt

SEQ ID NO: 4039 - DNA, 21 bp, Artificial Sequence
  source: /note="Description of Artificial Sequence: Synthetic oligonucleotide"
  source: /note="Description of Combined DNA/RNA Molecule: Synthetic oligonucleotide"
uggagaguguuguucgccgtt

SEQ ID NO: 4040 - DNA, 21 bp, Artificial Sequence
  source: /note="Description of Artificial Sequence: Synthetic oligonucleotide"
  source: /note="Description of Combined DNA/RNA Molecule: Synthetic oligonucleotide"
cggcgaacaacacucuccatt

SEQ ID NO: 4041 - DNA, 21 bp, Artificial Sequence
  source: /note="Description of Artificial Sequence: Synthetic oligonucleotide"
  source: /note="Description of Combined DNA/RNA Molecule: Synthetic oligonucleotide"
accccuugccugccacaagtt

SEQ ID NO: 4042 - DNA, 21 bp, Artificial Sequence
  source: /note="Description of Artificial Sequence: Synthetic oligonucleotide"
  source: /note="Description of Combined DNA/RNA Molecule: Synthetic oligonucleotide"
cuuguggcaggcaaggggutt

SEQ ID NO: 4043 - DNA, 21 bp, Artificial Sequence
  source: /note="Description of Artificial Sequence: Synthetic oligonucleotide"
  source: /note="Description of Combined DNA/RNA Molecule: Synthetic oligonucleotide"
cuggauggaugaguggcuutt

SEQ ID NO: 4044 - DNA, 21 bp, Artificial Sequence
  source: /note="Description of Artificial Sequence: Synthetic oligonucleotide"
  source: /note="Description of Combined DNA/RNA Molecule: Synthetic oligonucleotide"
aagccacucauccauccagtt

SEQ ID NO: 4045 - DNA, 21 bp, Artificial Sequence
  source: /note="Description of Artificial Sequence: Synthetic oligonucleotide"
  source: /note="Description of Combined DNA/RNA Molecule: Synthetic oligonucleotide"
caagaugauggaaguugggtt

SEQ ID NO: 4046 - DNA, 21 bp, Artificial Sequence
  source: /note="Description of Artificial Sequence: Synthetic oligonucleotide"
  source: /note="Description of Combined DNA/RNA Molecule: Synthetic oligonucleotide"
cccaacuuccaucaucuugtt

SEQ ID NO: 4047 - DNA, 21 bp, Artificial Sequence
  source: /note="Description of Artificial Sequence: Synthetic oligonucleotide"
  source: /note="Description of Combined DNA/RNA Molecule: Synthetic oligonucleotide"
uuucguuuggacuucucgatt

SEQ ID NO: 4048 - DNA, 21 bp, Artificial Sequence
  source: /note="Description of Artificial Sequence: Synthetic oligonucleotide"
  source: /note="Description of Combined DNA/RNA Molecule: Synthetic oligonucleotide"
ucgagaaguccaaacgaaatt

SEQ ID NO: 4049 - DNA, 21 bp, Artificial Sequence
  source: /note="Description of Artificial Sequence: Synthetic oligonucleotide"
  source: /note="Description of Combined DNA/RNA Molecule: Synthetic oligonucleotide"
ucaucuucaccaccucucutt

SEQ ID NO: 4050 - DNA, 21 bp, Artificial Sequence
  source: /note="Description of Artificial Sequence: Synthetic oligonucleotide"
  source: /note="Description of Combined DNA/RNA Molecule: Synthetic oligonucleotide"
agagagguggugaagaugatt

SEQ ID NO: 4051 - DNA, 21 bp, Artificial Sequence
  source: /note="Description of Artificial Sequence: Synthetic oligonucleotide"
  source: /note="Description of Combined DNA/RNA Molecule: Synthetic oligonucleotide"
ugcccaguucuucccgcugtt

SEQ ID NO: 4052 - DNA, 21 bp, Artificial Sequence
  source: /note="Description of Artificial Sequence: Synthetic oligonucleotide"
  source: /note="Description of Combined DNA/RNA Molecule: Synthetic oligonucleotide"
cagcgggaagaacugggcatt

SEQ ID NO: 4053 - DNA, 21 bp, Artificial Sequence
  source: /note="Description of Artificial Sequence: Synthetic oligonucleotide"
  source: /note="Description of Combined DNA/RNA Molecule: Synthetic oligonucleotide"
aaaaauggacaucauuucutt

SEQ ID NO: 4054 - DNA, 21 bp, Artificial Sequence
  source: /note="Description of Artificial Sequence: Synthetic oligonucleotide"
  source: /note="Description of Combined DNA/RNA Molecule: Synthetic oligonucleotide"
agaaaugauguccauuuuutt

SEQ ID NO: 4055 - DNA, 21 bp, Artificial Sequence
  source: /note="Description of Artificial Sequence: Synthetic oligonucleotide"
  source: /note="Description of Combined DNA/RNA Molecule: Synthetic oligonucleotide"
cuugagcuucaggaggaugtt

SEQ ID NO: 4056 - DNA, 21 bp, Artificial Sequence
  source: /note="Description of Artificial Sequence: Synthetic oligonucleotide"
  source: /note="Description of Combined DNA/RNA Molecule: Synthetic oligonucleotide"
cauccuccugaagcucaagtt

SEQ ID NO: 4057 - DNA, 21 bp, Artificial Sequence
  source: /note="Description of Artificial Sequence: Synthetic oligonucleotide"
  source: /note="Description of Combined DNA/RNA Molecule: Synthetic oligonucleotide"
ccucucugccacccaugcutt

SEQ ID NO: 4058 - DNA, 21 bp, Artificial Sequence
  source: /note="Description of Artificial Sequence: Synthetic oligonucleotide"
  source: /note="Description of Combined DNA/RNA Molecule: Synthetic oligonucleotide"
agcauggguggcagagaggtt

SEQ ID NO: 4059 - DNA, 21 bp, Artificial Sequence
  source: /note="Description of Artificial Sequence: Synthetic oligonucleotide"
  source: /note="Description of Combined DNA/RNA Molecule: Synthetic oligonucleotide"
aaagucaggaucccuaagatt

SEQ ID NO: 4060 - DNA, 21 bp, Artificial Sequence
  source: /note="Description of Artificial Sequence: Synthetic oligonucleotide"
  source: /note="Description of Combined DNA/RNA Molecule: Synthetic oligonucleotide"
ucuuagggauccugacuuutt

SEQ ID NO: 4061 - DNA, 21 bp, Artificial Sequence
  source: /note="Description of Artificial Sequence: Synthetic oligonucleotide"
  source: /note="Description of Combined DNA/RNA Molecule: Synthetic oligonucleotide"
cgaccacggaggaauccuutt

SEQ ID NO: 4062 - DNA, 21 bp, Artificial Sequence
  source: /note="Description of Artificial Sequence: Synthetic oligonucleotide"
  source: /note="Description of Combined DNA/RNA Molecule: Synthetic oligonucleotide"
aaggauuccuccguggucgtt

SEQ ID NO: 4063 - DNA, 21 bp, Artificial Sequence
  source: /note="Description of Artificial Sequence: Synthetic oligonucleotide"
  source: /note="Description of Combined DNA/RNA Molecule: Synthetic oligonucleotide"
uuccgucuggacaccccuutt

SEQ ID NO: 4064 - DNA, 21 bp, Artificial Sequence
  source: /note="Description of Artificial Sequence: Synthetic oligonucleotide"
  source: /note="Description of Combined DNA/RNA Molecule: Synthetic oligonucleotide"
aagggguguccagacggaatt

SEQ ID NO: 4065 - DNA, 21 bp, Artificial Sequence
  source: /note="Description of Artificial Sequence: Synthetic oligonucleotide"
  source: /note="Description of Combined DNA/RNA Molecule: Synthetic oligonucleotide"
ccacccaugcugcuggcugtt

SEQ ID NO: 4066 - DNA, 21 bp, Artificial Sequence
  source: /note="Description of Artificial Sequence: Synthetic oligonucleotide"
  source: /note="Description of Combined DNA/RNA Molecule: Synthetic oligonucleotide"
cagccagcagcauggguggtt

SEQ ID NO: 4067 - DNA, 21 bp, Artificial Sequence
  source: /note="Description of Artificial Sequence: Synthetic oligonucleotide"
  source: /note="Description of Combined DNA/RNA Molecule: Synthetic oligonucleotide"
ugagaaaaagaaugaccactt

SEQ ID NO: 4068 - DNA, 21 bp, Artificial Sequence
  source: /note="Description of Artificial Sequence: Synthetic oligonucleotide"
  source: /note="Description of Combined DNA/RNA Molecule: Synthetic oligonucleotide"
guggucauucuuuuucucatt

SEQ ID NO: 4069 - DNA, 21 bp, Artificial Sequence
  source: /note="Description of Artificial Sequence: Synthetic oligonucleotide"
  source: /note="Description of Combined DNA/RNA Molecule: Synthetic oligonucleotide"
uaagaugaugccaggcugutt

SEQ ID NO: 4070 - DNA, 21 bp, Artificial Sequence
  source: /note="Description of Artificial Sequence: Synthetic oligonucleotide"
  source: /note="Description of Combined DNA/RNA Molecule: Synthetic oligonucleotide"
acagccuggcaucaucuuatt

SEQ ID NO: 4071 - DNA, 21 bp, Artificial Sequence
  source: /note="Description of Artificial Sequence: Synthetic oligonucleotide"
  source: /note="Description of Combined DNA/RNA Molecule: Synthetic oligonucleotide"
aguuauauuaaauuuuaautt

SEQ ID NO: 4072 - DNA, 21 bp, Artificial Sequence
  source: /note="Description of Artificial Sequence: Synthetic oligonucleotide"
  source: /note="Description of Combined DNA/RNA Molecule: Synthetic oligonucleotide"
auuaaaauuuaauauaacutt

SEQ ID NO: 4073 - DNA, 21 bp, Artificial Sequence
  source: /note="Description of Artificial Sequence: Synthetic oligonucleotide"
  source: /note="Description of Combined DNA/RNA Molecule: Synthetic oligonucleotide"
ucuucccgcuguggggacatt

SEQ ID NO: 4074 - DNA, 21 bp, Artificial Sequence
  source: /note="Description of Artificial Sequence: Synthetic oligonucleotide"
  source: /note="Description of Combined DNA/RNA Molecule: Synthetic oligonucleotide"
uguccccacagcgggaagatt

SEQ ID NO: 4075 - DNA, 21 bp, Artificial Sequence
  source: /note="Description of Artificial Sequence: Synthetic oligonucleotide"
  source: /note="Description of Combined DNA/RNA Molecule: Synthetic oligonucleotide"
ugccacaagccagggcacutt

SEQ ID NO: 4076 - DNA, 21 bp, Artificial Sequence
  source: /note="Description of Artificial Sequence: Synthetic oligonucleotide"
  source: /note="Description of Combined DNA/RNA Molecule: Synthetic oligonucleotide"
agugcccuggcuuguggcatt

SEQ ID NO: 4077 - DNA, 21 bp, Artificial Sequence
  source: /note="Description of Artificial Sequence: Synthetic oligonucleotide"
  source: /note="Description of Combined DNA/RNA Molecule: Synthetic oligonucleotide"
agcgcaguuaugcccaguutt

SEQ ID NO: 4078 - DNA, 21 bp, Artificial Sequence
  source: /note="Description of Artificial Sequence: Synthetic oligonucleotide"
  source: /note="Description of Combined DNA/RNA Molecule: Synthetic oligonucleotide"
aacugggcauaacugcgcutt

SEQ ID NO: 4079 - DNA, 21 bp, Artificial Sequence
  source: /note="Description of Artificial Sequence: Synthetic oligonucleotide"
  source: /note="Description of Combined DNA/RNA Molecule: Synthetic oligonucleotide"
ggaccaggagaaagucaggtt

SEQ ID NO: 4080 - DNA, 21 bp, Artificial Sequence
  source: /note="Description of Artificial Sequence: Synthetic oligonucleotide"
  source: /note="Description of Combined DNA/RNA Molecule: Synthetic oligonucleotide"
ccugacuuucuccuggucctt

SEQ ID NO: 4081 - DNA, 21 bp, Artificial Sequence
  source: /note="Description of Artificial Sequence: Synthetic oligonucleotide"
  source: /note="Description of Combined DNA/RNA Molecule: Synthetic oligonucleotide"
uguccacugccccagccactt

SEQ ID NO: 4082 - DNA, 21 bp, Artificial Sequence
  source: /note="Description of Artificial Sequence: Synthetic oligonucleotide"
  source: /note="Description of Combined DNA/RNA Molecule: Synthetic oligonucleotide"
guggcuggggcaguggacatt

SEQ ID NO: 4083 - DNA, 21 bp, Artificial Sequence
  source: /note="Description of Artificial Sequence: Synthetic oligonucleotide"
  source: /note="Description of Combined DNA/RNA Molecule: Synthetic oligonucleotide"
aucgcggccugaggcugcutt

SEQ ID NO: 4084 - DNA, 21 bp, Artificial Sequence
  source: /note="Description of Artificial Sequence: Synthetic oligonucleotide"
  source: /note="Description of Combined DNA/RNA Molecule: Synthetic oligonucleotide"
agcagccucaggccgcgautt

SEQ ID NO: 4085 - DNA, 21 bp, Artificial Sequence
  source: /note="Description of Artificial Sequence: Synthetic oligonucleotide"
  source: /note="Description of Combined DNA/RNA Molecule: Synthetic oligonucleotide"
ggggauguggggaccaggatt

SEQ ID NO: 4086 - DNA, 21 bp, Artificial Sequence
  source: /note="Description of Artificial Sequence: Synthetic oligonucleotide"
  source: /note="Description of Combined DNA/RNA Molecule: Synthetic oligonucleotide"
uccugguccccacaucccctt

SEQ ID NO: 4087 - DNA, 21 bp, Artificial Sequence
  source: /note="Description of Artificial Sequence: Synthetic oligonucleotide"
  source: /note="Description of Combined DNA/RNA Molecule: Synthetic oligonucleotide"
cuggaaauaaauucuugcutt

SEQ ID NO: 4088 - DNA, 21 bp, Artificial Sequence
  source: /note="Description of Artificial Sequence: Synthetic oligonucleotide"
  source: /note="Description of Combined DNA/RNA Molecule: Synthetic oligonucleotide"
agcaagaauuuauuuccagtt

SEQ ID NO: 4089 - DNA, 21 bp, Artificial Sequence
  source: /note="Description of Artificial Sequence: Synthetic oligonucleotide"
  source: /note="Description of Combined DNA/RNA Molecule: Synthetic oligonucleotide"
uugaaacuguccauucaautt

SEQ ID NO: 4090 - DNA, 21 bp, Artificial Sequence
  source: /note="Description of Artificial Sequence: Synthetic oligonucleotide"
  source: /note="Description of Combined DNA/RNA Molecule: Synthetic oligonucleotide"
auugaauggacaguuucaatt

SEQ ID NO: 4091 - DNA, 21 bp, Artificial Sequence
  source: /note="Description of Artificial Sequence: Synthetic oligonucleotide"
  source: /note="Description of Combined DNA/RNA Molecule: Synthetic oligonucleotide"
guggggacacgaccacggatt

SEQ ID NO: 4092 - DNA, 21 bp, Artificial Sequence
  source: /note="Description of Artificial Sequence: Synthetic oligonucleotide"
  source: /note="Description of Combined DNA/RNA Molecule: Synthetic oligonucleotide"
uccguggucguguccccactt

SEQ ID NO: 4093 - DNA, 21 bp, Artificial Sequence
  source: /note="Description of Artificial Sequence: Synthetic oligonucleotide"
  source: /note="Description of Combined DNA/RNA Molecule: Synthetic oligonucleotide"
cgcaguggggcuuuaugggtt

SEQ ID NO: 4094 - DNA, 21 bp, Artificial Sequence
  source: /note="Description of Artificial Sequence: Synthetic oligonucleotide"
  source: /note="Description of Combined DNA/RNA Molecule: Synthetic oligonucleotide"
cccauaaagccccacugcgtt

SEQ ID NO: 4095 - DNA, 21 bp, Artificial Sequence
  source: /note="Description of Artificial Sequence: Synthetic oligonucleotide"
  source: /note="Description of Combined DNA/RNA Molecule: Synthetic oligonucleotide"
uugucuuuauaugugaauutt

SEQ ID NO: 4096 - DNA, 21 bp, Artificial Sequence
  source: /note="Description of Artificial Sequence: Synthetic oligonucleotide"
  source: /note="Description of Combined DNA/RNA Molecule: Synthetic oligonucleotide"
aauucacauauaaagacaatt

SEQ ID NO: 4097 - DNA, 21 bp, Artificial Sequence
  source: /note="Description of Artificial Sequence: Synthetic oligonucleotide"
  source: /note="Description of Combined DNA/RNA Molecule: Synthetic oligonucleotide"
ucacccuggcuaagaugautt

SEQ ID NO: 4098 - DNA, 21 bp, Artificial Sequence
  source: /note="Description of Artificial Sequence: Synthetic oligonucleotide"
  source: /note="Description of Combined DNA/RNA Molecule: Synthetic oligonucleotide"
aucaucuuagccagggugatt

SEQ ID NO: 4099 - DNA, 21 bp, Artificial Sequence
  source: /note="Description of Artificial Sequence: Synthetic oligonucleotide"
  source: /note="Description of Combined DNA/RNA Molecule: Synthetic oligonucleotide"
guaucugcucaggccugagtt

SEQ ID NO: 4100 - DNA, 21 bp, Artificial Sequence
  source: /note="Description of Artificial Sequence: Synthetic oligonucleotide"
  source: /note="Description of Combined DNA/RNA Molecule: Synthetic oligonucleotide"
cucaggccugagcagauactt

SEQ ID NO: 4101 - DNA, 21 bp, Artificial Sequence
  source: /note="Description of Artificial Sequence: Synthetic oligonucleotide"
  source: /note="Description of Combined DNA/RNA Molecule: Synthetic oligonucleotide"
augaguggcuucuucuccatt

SEQ ID NO: 4102 - DNA, 21 bp, Artificial Sequence
  source: /note="Description of Artificial Sequence: Synthetic oligonucleotide"
  source: /note="Description of Combined DNA/RNA Molecule: Synthetic oligonucleotide"
uggagaagaagccacucautt

SEQ ID NO: 4103 - DNA, 21 bp, Artificial Sequence
  source: /note="Description of Artificial Sequence: Synthetic oligonucleotide"
  source: /note="Description of Combined DNA/RNA Molecule: Synthetic oligonucleotide"
gaaguuggggccaagccagtt

SEQ ID NO: 4104 - DNA, 21 bp, Artificial Sequence
  source: /note="Description of Artificial Sequence: Synthetic oligonucleotide"
  source: /note="Description of Combined DNA/RNA Molecule: Synthetic oligonucleotide"
cuggcuuggccccaacuuctt

SEQ ID NO: 4105 - DNA, 21 bp, Artificial Sequence
  source: /note="Description of Artificial Sequence: Synthetic oligonucleotide"
  source: /note="Description of Combined DNA/RNA Molecule: Synthetic oligonucleotide"
ucagggacucgggacccugtt

SEQ ID NO: 4106 - DNA, 21 bp, Artificial Sequence
  source: /note="Description of Artificial Sequence: Synthetic oligonucleotide"
  source: /note="Description of Combined DNA/RNA Molecule: Synthetic oligonucleotide"
cagggucccgagucccugatt

SEQ ID NO: 4107 - DNA, 21 bp, Artificial Sequence
  source: /note="Description of Artificial Sequence: Synthetic oligonucleotide"
  source: /note="Description of Combined DNA/RNA Molecule: Synthetic oligonucleotide"
uccuacggauugcccccactt

SEQ ID NO: 4108 - DNA, 21 bp, Artificial Sequence
  source: /note="Description of Artificial Sequence: Synthetic oligonucleotide"
  source: /note="Description of Combined DNA/RNA Molecule: Synthetic oligonucleotide"
gugggggcaauccguaggatt

SEQ ID NO: 4109 - DNA, 21 bp, Artificial Sequence
  source: /note="Description of Artificial Sequence: Synthetic oligonucleotide"
  source: /note="Description of Combined DNA/RNA Molecule: Synthetic oligonucleotide"
uuacucugauucugggaactt

SEQ ID NO: 4110 - DNA, 21 bp, Artificial Sequence
  source: /note="Description of Artificial Sequence: Synthetic oligonucleotide"
  source: /note="Description of Combined DNA/RNA Molecule: Synthetic oligonucleotide"
guucccagaaucagaguaatt

SEQ ID NO: 4111 - DNA, 21 bp, Artificial Sequence
  source: /note="Description of Artificial Sequence: Synthetic oligonucleotide"
  source: /note="Description of Combined DNA/RNA Molecule: Synthetic oligonucleotide"
aucccuaagagucuucccutt

SEQ ID NO: 4112 - DNA, 21 bp, Artificial Sequence
  source: /note="Description of Artificial Sequence: Synthetic oligonucleotide"
  source: /note="Description of Combined DNA/RNA Molecule: Synthetic oligonucleotide"
agggaagacucuuagggautt

SEQ ID NO: 4113 - DNA, 21 bp, Artificial Sequence
  source: /note="Description of Artificial Sequence: Synthetic oligonucleotide"
  source: /note="Description of Combined DNA/RNA Molecule: Synthetic oligonucleotide"
ugccaaaguacaucuuccgtt

SEQ ID NO: 4114 - DNA, 21 bp, Artificial Sequence
  source: /note="Description of Artificial Sequence: Synthetic oligonucleotide"
  source: /note="Description of Combined DNA/RNA Molecule: Synthetic oligonucleotide"
cggaagauguacuuuggcatt

SEQ ID NO: 4115 - DNA, 21 bp, Artificial Sequence
  source: /note="Description of Artificial Sequence: Synthetic oligonucleotide"
  source: /note="Description of Combined DNA/RNA Molecule: Synthetic oligonucleotide"
uccucggguuuaggggaugtt

SEQ ID NO: 4116 - DNA, 21 bp, Artificial Sequence
  source: /note="Description of Artificial Sequence: Synthetic oligonucleotide"
  source: /note="Description of Combined DNA/RNA Molecule: Synthetic oligonucleotide"
cauccccuaaacccgaggatt

SEQ ID NO: 4117 - DNA, 21 bp, Artificial Sequence
  source: /note="Description of Artificial Sequence: Synthetic oligonucleotide"
  source: /note="Description of Combined DNA/RNA Molecule: Synthetic oligonucleotide"
ugcugaaaccucagcaggctt

SEQ ID NO: 4118 - DNA, 21 bp, Artificial Sequence
  source: /note="Description of Artificial Sequence: Synthetic oligonucleotide"
  source: /note="Description of Combined DNA/RNA Molecule: Synthetic oligonucleotide"
gccugcugagguuucagcatt

SEQ ID NO: 4119 - DNA, 21 bp, Artificial Sequence
  source: /note="Description of Artificial Sequence: Synthetic oligonucleotide"
  source: /note="Description of Combined DNA/RNA Molecule: Synthetic oligonucleotide"
ccacccacgggugugugggtt

SEQ ID NO: 4120 - DNA, 21 bp, Artificial Sequence
  source: /note="Description of Artificial Sequence: Synthetic oligonucleotide"
  source: /note="Description of Combined DNA/RNA Molecule: Synthetic oligonucleotide"
cccacacacccguggguggtt

SEQ ID NO: 4121 - DNA, 21 bp, Artificial Sequence
  source: /note="Description of Artificial Sequence: Synthetic oligonucleotide"
  source: /note="Description of Combined DNA/RNA Molecule: Synthetic oligonucleotide"
uggugcaguaaugacuacctt

SEQ ID NO: 4122 - DNA, 21 bp, Artificial Sequence
  source: /note="Description of Artificial Sequence: Synthetic oligonucleotide"
  source: /note="Description of Combined DNA/RNA Molecule: Synthetic oligonucleotide"
gguagucauuacugcaccatt

SEQ ID NO: 4123 - DNA, 21 bp, Artificial Sequence
  source: /note="Description of Artificial Sequence: Synthetic oligonucleotide"
  source: /note="Description of Combined DNA/RNA Molecule: Synthetic oligonucleotide"
uucuccaccuagauucuuutt

SEQ ID NO: 4124 - DNA, 21 bp, Artificial Sequence
  source: /note="Description of Artificial Sequence: Synthetic oligonucleotide"
  source: /note="Description of Combined DNA/RNA Molecule: Synthetic oligonucleotide"
aaagaaucuagguggagaatt

SEQ ID NO: 4125 - DNA, 21 bp, Artificial Sequence
  source: /note="Description of Artificial Sequence: Synthetic oligonucleotide"
  source: /note="Description of Combined DNA/RNA Molecule: Synthetic oligonucleotide"
uaaggcgccggcgaucgcgtt

SEQ ID NO: 4126 - DNA, 21 bp, Artificial Sequence
  source: /note="Description of Artificial Sequence: Synthetic oligonucleotide"
  source: /note="Description of Combined DNA/RNA Molecule: Synthetic oligonucleotide"
cgcgaucgccggcgccuuatt

SEQ ID NO: 4127 - DNA, 21 bp, Artificial Sequence
  source: /note="Description of Artificial Sequence: Synthetic oligonucleotide"
  source: /note="Description of Combined DNA/RNA Molecule: Synthetic oligonucleotide"
uggaacuaguaaauuccautt

SEQ ID NO: 4128 - DNA, 21 bp, Artificial Sequence
  source: /note="Description of Artificial Sequence: Synthetic oligonucleotide"
  source: /note="Description of Combined DNA/RNA Molecule: Synthetic oligonucleotide"
auggaauuuacuaguuccatt

SEQ ID NO: 4129 - DNA, 21 bp, Artificial Sequence
  source: /note="Description of Artificial Sequence: Synthetic oligonucleotide"
  source: /note="Description of Combined DNA/RNA Molecule: Synthetic oligonucleotide"
ggacccugcuggaccccuutt

SEQ ID NO: 4130 - DNA, 21 bp, Artificial Sequence
  source: /note="Description of Artificial Sequence: Synthetic oligonucleotide"
  source: /note="Description of Combined DNA/RNA Molecule: Synthetic oligonucleotide"
aagggguccagcagggucctt

SEQ ID NO: 4131 - DNA, 21 bp, Artificial Sequence
  source: /note="Description of Artificial Sequence: Synthetic oligonucleotide"
  source: /note="Description of Combined DNA/RNA Molecule: Synthetic oligonucleotide"
ucaauuauuucacuuaacctt

SEQ ID NO: 4132 - DNA, 21 bp, Artificial Sequence
  source: /note="Description of Artificial Sequence: Synthetic oligonucleotide"
  source: /note="Description of Combined DNA/RNA Molecule: Synthetic oligonucleotide"
gguuaagugaaauaauugatt

SEQ ID NO: 4133 - DNA, 21 bp, Artificial Sequence
  source: /note="Description of Artificial Sequence: Synthetic oligonucleotide"
  source: /note="Description of Combined DNA/RNA Molecule: Synthetic oligonucleotide"
cccggacaagggcaacgagtt

SEQ ID NO: 4134 - DNA, 21 bp, Artificial Sequence
  source: /note="Description of Artificial Sequence: Synthetic oligonucleotide"
  source: /note="Description of Combined DNA/RNA Molecule: Synthetic oligonucleotide"
cucguugcccuuguccgggtt

SEQ ID NO: 4135 - DNA, 21 bp, Artificial Sequence
  source: /note="Description of Artificial Sequence: Synthetic oligonucleotide"
  source: /note="Description of Combined DNA/RNA Molecule: Synthetic oligonucleotide"
uuuuaaaacugugaaccggtt

SEQ ID NO: 4136 - DNA, 21 bp, Artificial Sequence
  source: /note="Description of Artificial Sequence: Synthetic oligonucleotide"
  source: /note="Description of Combined DNA/RNA Molecule: Synthetic oligonucleotide"
ccgguucacaguuuuaaaatt

SEQ ID NO: 4137 - DNA, 21 bp, Artificial Sequence
  source: /note="Description of Artificial Sequence: Synthetic oligonucleotide"
  source: /note="Description of Combined DNA/RNA Molecule: Synthetic oligonucleotide"
gugcuucgccgccagcacctt

SEQ ID NO: 4138 - DNA, 21 bp, Artificial Sequence
  source: /note="Description of Artificial Sequence: Synthetic oligonucleotide"
  source: /note="Description of Combined DNA/RNA Molecule: Synthetic oligonucleotide"
ggugcuggcggcgaagcactt

SEQ ID NO: 4139 - DNA, 21 bp, Artificial Sequence
  source: /note="Description of Artificial Sequence: Synthetic oligonucleotide"
  source: /note="Description of Combined DNA/RNA Molecule: Synthetic oligonucleotide"
uggaccccuuccucggguutt

SEQ ID NO: 4140 - DNA, 21 bp, Artificial Sequence
  source: /note="Description of Artificial Sequence: Synthetic oligonucleotide"
  source: /note="Description of Combined DNA/RNA Molecule: Synthetic oligonucleotide"
aacccgaggaagggguccatt

SEQ ID NO: 4141 - DNA, 21 bp, Artificial Sequence
  source: /note="Description of Artificial Sequence: Synthetic oligonucleotide"
  source: /note="Description of Combined DNA/RNA Molecule: Synthetic oligonucleotide"
cuguauauuaaggcgccggtt

SEQ ID NO: 4142 - DNA, 21 bp, Artificial Sequence
  source: /note="Description of Artificial Sequence: Synthetic oligonucleotide"
  source: /note="Description of Combined DNA/RNA Molecule: Synthetic oligonucleotide"
ccggcgccuuaauauacagtt

SEQ ID NO: 4143 - DNA, 21 bp, Artificial Sequence
  source: /note="Description of Artificial Sequence: Synthetic oligonucleotide"
  source: /note="Description of Combined DNA/RNA Molecule: Synthetic oligonucleotide"
uugcccccaccccucaccatt

SEQ ID NO: 4144 - DNA, 21 bp, Artificial Sequence
  source: /note="Description of Artificial Sequence: Synthetic oligonucleotide"
  source: /note="Description of Combined DNA/RNA Molecule: Synthetic oligonucleotide"
uggugaggggugggggcaatt

SEQ ID NO: 4145 - DNA, 21 bp, Artificial Sequence
  source: /note="Description of Artificial Sequence: Synthetic oligonucleotide"
  source: /note="Description of Combined DNA/RNA Molecule: Synthetic oligonucleotide"
auggggcggugugcccacutt

SEQ ID NO: 4146 - DNA, 21 bp, Artificial Sequence
  source: /note="Description of Artificial Sequence: Synthetic oligonucleotide"
  source: /note="Description of Combined DNA/RNA Molecule: Synthetic oligonucleotide"
agugggcacaccgccccautt

SEQ ID NO: 4147 - DNA, 21 bp, Artificial Sequence
  source: /note="Description of Artificial Sequence: Synthetic oligonucleotide"
  source: /note="Description of Combined DNA/RNA Molecule: Synthetic oligonucleotide"
cuauaguaaaaacauaguctt

SEQ ID NO: 4148 - DNA, 21 bp, Artificial Sequence
  source: /note="Description of Artificial Sequence: Synthetic oligonucleotide"
  source: /note="Description of Combined DNA/RNA Molecule: Synthetic oligonucleotide"
gacuauguuuuuacuauagtt

SEQ ID NO: 4149 - RNA, 21 nt, Artificial Sequence
  source: /note="Description of Artificial Sequence: Synthetic oligonucleotide"
gaaagagugucucaucuucuu

SEQ ID NO: 4150 - RNA, 23 nt, Artificial Sequence
  source: /note="Description of Artificial Sequence: Synthetic oligonucleotide"
aagaagaugagacacucuuucug

SEQ ID NO: 4151 - RNA, 21 nt, Artificial Sequence
  source: /note="Description of Artificial Sequence: Synthetic oligonucleotide"
cagaaagagugucucaucuua

SEQ ID NO: 4152 - RNA, 23 nt, Artificial Sequence
  source: /note="Description of Artificial Sequence: Synthetic oligonucleotide"
uaagaugagacacucuuucuggu

SEQ ID NO: 4153 - RNA, 23 nt, Artificial Sequence
  source: /note="Description of Artificial Sequence: Synthetic oligonucleotide"
uaagaugagacacucuuucuggu

SEQ ID NO: 4154 - DNA, 23 bp, Artificial Sequence
  source: /note="Description of Artificial Sequence: Synthetic oligonucleotide"
  source: /note="Description of Combined DNA/RNA Molecule: Synthetic oligonucleotide"
uaagaugagacacuctuucuggu

SEQ ID NO: 4155 - RNA, 21 nt, Artificial Sequence
  source: /note="Description of Artificial Sequence: Synthetic oligonucleotide"
cagaaagagugucucaucuua

SEQ ID NO: 4156 - RNA, 21 nt, Artificial Sequence
  source: /note="Description of Artificial Sequence: Synthetic oligonucleotide"
cagaaagagugucucaucuua

SEQ ID NO: 4157 - RNA, 23 nt, Artificial Sequence
  source: /note="Description of Artificial Sequence: Synthetic oligonucleotide"
uaagaugagacacucuuucuggu

SEQ ID NO: 4158 - RNA, 21 nt, Artificial Sequence
  source: /note="Description of Artificial Sequence: Synthetic oligonucleotide"
cagaaagagugucucaucuua

SEQ ID NO: 4159 - RNA, 23 nt, Artificial Sequence
  source: /note="Description of Artificial Sequence: Synthetic oligonucleotide"
uaagaugagacacucuuucuggu

SEQ ID NO: 4160 - RNA, 21 nt, Artificial Sequence
  source: /note="Description of Artificial Sequence: Synthetic oligonucleotide"
cagaaagagugucucaucuua

SEQ ID NO: 4161 - RNA, 23 nt, Artificial Sequence
  source: /note="Description of Artificial Sequence: Synthetic oligonucleotide"
uaagaugagacacucuuucuggu

SEQ ID NO: 4162 - RNA, 21 nt, Artificial Sequence
  source: /note="Description of Artificial Sequence: Synthetic oligonucleotide"
cagaaagagugucucaucuua

SEQ ID NO: 4163 - RNA, 23 nt, Artificial Sequence
  source: /note="Description of Artificial Sequence: Synthetic oligonucleotide"
uaagaugagacacucuuucuggu

SEQ ID NO: 4164 - RNA, 21 nt, Artificial Sequence
  source: /note="Description of Artificial Sequence: Synthetic oligonucleotide"
cagaaagagugucucaucuua

SEQ ID NO: 4165 - DNA, 23 bp, Artificial Sequence
  source: /note="Description of Artificial Sequence: Synthetic oligonucleotide"
  source: /note="Description of Combined DNA/RNA Molecule: Synthetic oligonucleotide"
uaagaugagacacuctuucuggu

SEQ ID NO: 4166 - RNA, 21 nt, Artificial Sequence
  source: /note="Description of Artificial Sequence: Synthetic oligonucleotide"
cagaaagagugucucaucuua

SEQ ID NO: 4167 - DNA, 23 bp, Artificial Sequence
  source: /note="Description of Artificial Sequence: Synthetic oligonucleotide"
  source: /note="Description of Combined DNA/RNA Molecule: Synthetic oligonucleotide"
uaagaugagacacuctuucuggu

SEQ ID NO: 4168 - RNA, 21 nt, Artificial Sequence
  source: /note="Description of Artificial Sequence: Synthetic oligonucleotide"
gaaagagugucucaucuucuu

SEQ ID NO: 4169 - RNA, 23 nt, Artificial Sequence
  source: /note="Description of Artificial Sequence: Synthetic oligonucleotide"
aagaagaugagacacucuuucug

SEQ ID NO: 4170 - RNA, 21 nt, Artificial Sequence
  source: /note="Description of Artificial Sequence: Synthetic oligonucleotide"
gaaagagugucucaucuucuu

SEQ ID NO: 4171 - RNA, 23 nt, Artificial Sequence
  source: /note="Description of Artificial Sequence: Synthetic oligonucleotide"
aagaagaugagacacucuuucug

SEQ ID NO: 4172 - RNA, 19 nt, Artificial Sequence
  source: /note="Description of Artificial Sequence: Synthetic oligonucleotide"
aagagugucucaucuucuu

SEQ ID NO: 4173 - RNA, 19 nt, Artificial Sequence
  source: /note="Description of Artificial Sequence: Synthetic oligonucleotide"
aagaagaugagacacucuu

SEQ ID NO: 4174 - RNA, 19 nt, Artificial Sequence
  source: /note="Description of Artificial Sequence: Synthetic oligonucleotide"
aagagugucucaucuucuu

SEQ ID NO: 4175 - RNA, 21 nt, Artificial Sequence
  source: /note="Description of Artificial Sequence: Synthetic oligonucleotide"
aagaagaugagacacucuuuc

SEQ ID NO: 4176 - RNA, 19 nt, Artificial Sequence
  source: /note="Description of Artificial Sequence: Synthetic oligonucleotide"
aagagugucucaucuucuu

SEQ ID NO: 4177 - RNA, 21 nt, Artificial Sequence
  source: /note="Description of Artificial Sequence: Synthetic oligonucleotide"
aagaagaugagacacucuuaa

SEQ ID NO: 4178 - RNA, 21 nt, Artificial Sequence
  source: /note="Description of Artificial Sequence: Synthetic oligonucleotide"
gaaagagugucucaucuucuu

SEQ ID NO: 4179 - RNA, 23 nt, Artificial Sequence
  source: /note="Description of Artificial Sequence: Synthetic oligonucleotide"
aagaagaugagacacucuuucug

SEQ ID NO: 4180 - RNA, 21 nt, Artificial Sequence
  source: /note="Description of Artificial Sequence: Synthetic oligonucleotide"
gaaagagugucucaucuucuu

SEQ ID NO: 4181 - RNA, 23 nt, Artificial Sequence
  source: /note="Description of Artificial Sequence: Synthetic oligonucleotide"
aagaagaugagacacucuuucaa

SEQ ID NO: 4182 - RNA, 19 nt, Artificial Sequence
  source: /note="Description of Artificial Sequence: Synthetic oligonucleotide"
gaaagagugucucaucuua

SEQ ID NO: 4183 - RNA, 19 nt, Artificial Sequence
  source: /note="Description of Artificial Sequence: Synthetic oligonucleotide"
uaagaugagacacucuuuc

SEQ ID NO: 4184 - RNA, 19 nt, Artificial Sequence
  source: /note="Description of Artificial Sequence: Synthetic oligonucleotide"
gaaagagugucucaucuua

SEQ ID NO: 4185 - RNA, 21 nt, Artificial Sequence
  source: /note="Description of Artificial Sequence: Synthetic oligonucleotide"
uaagaugagacacucuuucug

SEQ ID NO: 4186 - RNA, 19 nt, Artificial Sequence
  source: /note="Description of Artificial Sequence: Synthetic oligonucleotide"
gaaagagugucucaucuua

SEQ ID NO: 4187 - RNA, 21 nt, Artificial Sequence
  source: /note="Description of Artificial Sequence: Synthetic oligonucleotide"
uaagaugagacacucuuucaa

SEQ ID NO: 4188 - RNA, 21 nt, Artificial Sequence
  source: /note="Description of Artificial Sequence: Synthetic oligonucleotide"
cagaaagagugucucaucuua

SEQ ID NO: 4189 - RNA, 23 nt, Artificial Sequence
  source: /note="Description of Artificial Sequence: Synthetic oligonucleotide"
uaagaugagacacucuuucuggu

SEQ ID NO: 4190 - RNA, 21 nt, Artificial Sequence
  source: /note="Description of Artificial Sequence: Synthetic oligonucleotide"
cagaaagagugucucaucuua

SEQ ID NO: 4191 - RNA, 23 nt, Artificial Sequence
  source: /note="Description of Artificial Sequence: Synthetic oligonucleotide"
uaagaugagacacucuuucuggc

SEQ ID NO: 4192 - RNA, 21 nt, Artificial Sequence
  source: /note="Description of Artificial Sequence: Synthetic oligonucleotide"
gaaagagugucucaucuucuu

SEQ ID NO: 4193 - RNA, 23 nt, Artificial Sequence
  source: /note="Description of Artificial Sequence: Synthetic oligonucleotide"
aagaagaugagacacucuuucug

SEQ ID NO: 4194 - DNA, 21 bp, Artificial Sequence
  source: /note="Description of Artificial Sequence: Synthetic oligonucleotide"
  source: /note="Description of Combined DNA/RNA Molecule: Synthetic oligonucleotide"
gaaagagugtcucaucuucuu

SEQ ID NO: 4195 - RNA, 23 nt, Artificial Sequence
  source: /note="Description of Artificial Sequence: Synthetic oligonucleotide"
aagaagaugagacacucuuucug

SEQ ID NO: 4196 - RNA, 21 nt, Artificial Sequence
  source: /note="Description of Artificial Sequence: Synthetic oligonucleotide"
cagaaagagugucucaucuua

SEQ ID NO: 4197 - RNA, 23 nt, Artificial Sequence
  source: /note="Description of Artificial Sequence: Synthetic oligonucleotide"
uaagaugagacacucuuucuggu

SEQ ID NO: 4198 - DNA, 21 bp, Artificial Sequence
  source: /note="Description of Artificial Sequence: Synthetic oligonucleotide"
  source: /note="Description of Combined DNA/RNA Molecule: Synthetic oligonucleotide"
cagaaagagtgucucaucuua

SEQ ID NO: 4199 - DNA, 23 bp, Artificial Sequence
  source: /note="Description of Artificial Sequence: Synthetic oligonucleotide"
  source: /note="Description of Combined DNA/RNA Molecule: Synthetic oligonucleotide"
uaagaugagacacuctuucuggu

SEQ ID NO: 4200 - RNA, 21 nt, Artificial Sequence
  source: /note="Description of Artificial Sequence: Synthetic oligonucleotide"
gaaagagugucucaucuucuu

SEQ ID NO: 4201 - RNA, 23 nt, Artificial Sequence
  source: /note="Description of Artificial Sequence: Synthetic oligonucleotide"
aagaagaugagacacucuuucug

SEQ ID NO: 4202 - RNA, 21 nt, Artificial Sequence
  source: /note="Description of Artificial Sequence: Synthetic oligonucleotide"
gaaagagugucucaucuucuu

SEQ ID NO: 4203 - RNA, 23 nt, Artificial Sequence
  source: /note="Description of Artificial Sequence: Synthetic oligonucleotide"
aagaagaugagacacucuuucug

SEQ ID NO: 4204 - RNA, 21 nt, Artificial Sequence
  source: /note="Description of Artificial Sequence: Synthetic oligonucleotide"
gaaagagugucucaucuucuu

SEQ ID NO: 4205 - RNA, 23 nt, Artificial Sequence
  source: /note="Description of Artificial Sequence: Synthetic oligonucleotide"
aagaagaugagacacucuuucug

SEQ ID NO: 4206 - DNA, 21 bp, Artificial Sequence
  source: /note="Description of Artificial Sequence: Synthetic oligonucleotide"
  source: /note="Description of Combined DNA/RNA Molecule: Synthetic oligonucleotide"
gaaagagugtcucaucuucuu

SEQ ID NO: 4207 - RNA, 23 nt, Artificial Sequence
  source: /note="Description of Artificial Sequence: Synthetic oligonucleotide"
aagaagaugagacacucuuucug

SEQ ID NO: 4208 - RNA, 21 nt, Artificial Sequence
  source: /note="Description of Artificial Sequence: Synthetic oligonucleotide"
gaaagagugucucaucuucuu

SEQ ID NO: 4209 - RNA, 23 nt, Artificial Sequence
  source: /note="Description of Artificial Sequence: Synthetic oligonucleotide"
aagaagaugagacacucuuucug

SEQ ID NO: 4210 - RNA, 21 nt, Artificial Sequence
  source: /note="Description of Artificial Sequence: Synthetic oligonucleotide"
gaaagagugucucaucuucuu

SEQ ID NO: 4211 - RNA, 23 nt, Artificial Sequence
  source: /note="Description of Artificial Sequence: Synthetic oligonucleotide"
aagaagaugagacacucuuucug

SEQ ID NO: 4212 - RNA, 21 nt, Artificial Sequence
  source: /note="Description of Artificial Sequence: Synthetic oligonucleotide"
gaaagagugucucaucuucuu

SEQ ID NO: 4213 - RNA, 23 nt, Artificial Sequence
  source: /note="Description of Artificial Sequence: Synthetic oligonucleotide"
aagaagaugagacacucuuucug

SEQ ID NO: 4214 - RNA, 21 nt, Artificial Sequence
  source: /note="Description of Artificial Sequence: Synthetic oligonucleotide"
gaaagagugucucaucuucuu

SEQ ID NO: 4215 - RNA, 23 nt, Artificial Sequence
  source: /note="Description of Artificial Sequence: Synthetic oligonucleotide"
aagaagaugagacacucuuucug

SEQ ID NO: 4216 - RNA, 21 nt, Artificial Sequence
  source: /note="Description of Artificial Sequence: Synthetic oligonucleotide"
gaaagagugucucaucuucuu

SEQ ID NO: 4217 - RNA, 23 nt, Artificial Sequence
  source: /note="Description of Artificial Sequence: Synthetic oligonucleotide"
aagaagaugagacacucuuucug

SEQ ID NO: 4218 - RNA, 21 nt, Artificial Sequence
  source: /note="Description of Artificial Sequence: Synthetic oligonucleotide"
gaaagagugucucaucuucuu

SEQ ID NO: 4219 - RNA, 23 nt, Artificial Sequence
  source: /note="Description of Artificial Sequence: Synthetic oligonucleotide"
aagaagaugagacacucuuucug

SEQ ID NO: 4220 - RNA, 21 nt, Artificial Sequence
  source: /note="Description of Artificial Sequence: Synthetic oligonucleotide"
gaaagagugucucaucuucuu

SEQ ID NO: 4221 - RNA, 23 nt, Artificial Sequence
  source: /note="Description of Artificial Sequence: Synthetic oligonucleotide"
aagaagaugagacacucuuucug

SEQ ID NO: 4222 - RNA, 21 nt, Artificial Sequence
  source: /note="Description of Artificial Sequence: Synthetic oligonucleotide"
gaaagagugucucaucuucuu

SEQ ID NO: 4223 - RNA, 23 nt, Artificial Sequence
  source: /note="Description of Artificial Sequence: Synthetic oligonucleotide"
aagaagaugagacacucuuucug

SEQ ID NO: 4224 - RNA, 21 nt, Artificial Sequence
  source: /note="Description of Artificial Sequence: Synthetic oligonucleotide"
gaaagagugucucaucuucuu

SEQ ID NO: 4225 - RNA, 23 nt, Artificial Sequence
  source: /note="Description of Artificial Sequence: Synthetic oligonucleotide"
aagaagaugagacacucuuucug

SEQ ID NO: 4226 - RNA, 21 nt, Artificial Sequence
  source: /note="Description of Artificial Sequence: Synthetic oligonucleotide"
gaaagagugucucaucuucuu

SEQ ID NO: 4227 - RNA, 23 nt, Artificial Sequence
  source: /note="Description of Artificial Sequence: Synthetic oligonucleotide"
aagaagaugagacacucuuucug

SEQ ID NO: 4228 - RNA, 21 nt, Artificial Sequence
  source: /note="Description of Artificial Sequence: Synthetic oligonucleotide"
gaaagagugucucaucuucuu

SEQ ID NO: 4229 - RNA, 23 nt, Artificial Sequence
  source: /note="Description of Artificial Sequence: Synthetic oligonucleotide"
aagaagaugagacacucuuucug

SEQ ID NO: 4230 - RNA, 21 nt, Artificial Sequence
  source: /note="Description of Artificial Sequence: Synthetic oligonucleotide"
gaaagagugucucaucuucuu

SEQ ID NO: 4231 - RNA, 23 nt, Artificial Sequence
  source: /note="Description of Artificial Sequence: Synthetic oligonucleotide"
aagaagaugagacacucuuucug

SEQ ID NO: 4232 - RNA, 21 nt, Artificial Sequence
  source: /note="Description of Artificial Sequence: Synthetic oligonucleotide"
gaaagagugucucaucuucuu

SEQ ID NO: 4233 - RNA, 23 nt, Artificial Sequence
  source: /note="Description of Artificial Sequence: Synthetic oligonucleotide"
aagaagaugagacacucuuucug

SEQ ID NO: 4234 - RNA, 21 nt, Artificial Sequence
  source: /note="Description of Artificial Sequence: Synthetic oligonucleotide"
gaaagagugucucaucuucuu

SEQ ID NO: 4235 - RNA, 23 nt, Artificial Sequence
  source: /note="Description of Artificial Sequence: Synthetic oligonucleotide"
aagaagaugagacacucuuucug

SEQ ID NO: 4236 - RNA, 21 nt, Artificial Sequence
  source: /note="Description of Artificial Sequence: Synthetic oligonucleotide"
gaaagagugucucaucuucuu

SEQ ID NO: 4237 - RNA, 23 nt, Artificial Sequence
  source: /note="Description of Artificial Sequence: Synthetic oligonucleotide"
aagaagaugagacacucuuucug

SEQ ID NO: 4238 - RNA, 21 nt, Artificial Sequence
  source: /note="Description of Artificial Sequence: Synthetic oligonucleotide"
gaaagagugucucaucuucuu

SEQ ID NO: 4239 - RNA, 23 nt, Artificial Sequence
  source: /note="Description of Artificial Sequence: Synthetic oligonucleotide"
aagaagaugagacacucuuucug

SEQ ID NO: 4240 - RNA, 21 nt, Artificial Sequence
  source: /note="Description of Artificial Sequence: Synthetic oligonucleotide"
gaaagagugucucaucuucuu

SEQ ID NO: 4241 - RNA, 23 nt, Artificial Sequence
  source: /note="Description of Artificial Sequence: Synthetic oligonucleotide"
aagaagaugagacacucuuucug

SEQ ID NO: 4242 - RNA, 21 nt, Artificial Sequence
  source: /note="Description of Artificial Sequence: Synthetic oligonucleotide"
gaaagagugucucaucuucuu

SEQ ID NO: 4243 - RNA, 23 nt, Artificial Sequence
  source: /note="Description of Artificial Sequence: Synthetic oligonucleotide"
aagaagaugagacacucuuucug

SEQ ID NO: 4244 - RNA, 21 nt, Artificial Sequence
  source: /note="Description of Artificial Sequence: Synthetic oligonucleotide"
gaaagagugucucaucuucuu

SEQ ID NO: 4245 - RNA, 23 nt, Artificial Sequence
  source: /note="Description of Artificial Sequence: Synthetic oligonucleotide"
aagaagaugagacacucuuucug

SEQ ID NO: 4246 - DNA, 21 bp, Artificial Sequence
  source: /note="Description of Artificial Sequence: Synthetic oligonucleotide"
  source: /note="Description of Combined DNA/RNA Molecule: Synthetic oligonucleotide"
gaaagagugtcucaucuucuu

SEQ ID NO: 4247 - RNA, 23 nt, Artificial Sequence
  source: /note="Description of Artificial Sequence: Synthetic oligonucleotide"
aagaagaugagacacucuuucug

SEQ ID NO: 4248 - DNA, 21 bp, Artificial Sequence
  source: /note="Description of Artificial Sequence: Synthetic oligonucleotide"
  source: /note="Description of Combined DNA/RNA Molecule: Synthetic oligonucleotide"
gaaagagugucucaucuucuu

SEQ ID NO: 4249 - RNA, 23 nt, Artificial Sequence
  source: /note="Description of Artificial Sequence: Synthetic oligonucleotide"
aagaagaugagacacucuuucug

SEQ ID NO: 4250 - DNA, 21 bp, Artificial Sequence
  source: /note="Description of Artificial Sequence: Synthetic oligonucleotide"
  source: /note="Description of Combined DNA/RNA Molecule: Synthetic oligonucleotide"
gaaagaguguctcaucuucuu

SEQ ID NO: 4251 - RNA, 23 nt, Artificial Sequence
  source: /note="Description of Artificial Sequence: Synthetic oligonucleotide"
aagaagaugagacacucuuucug

SEQ ID NO: 4252 - DNA, 21 bp, Artificial Sequence
  source: /note="Description of Artificial Sequence: Synthetic oligonucleotide"
  source: /note="Description of Combined DNA/RNA Molecule: Synthetic oligonucleotide"
gaaagagugucucaucuucuu

SEQ ID NO: 4253 - RNA, 23 nt, Artificial Sequence
  source: /note="Description of Artificial Sequence: Synthetic oligonucleotide"
aagaagaugagacacucuuucug

SEQ ID NO: 4254 - DNA, 21 bp, Artificial Sequence
  source: /note="Description of Artificial Sequence: Synthetic oligonucleotide"
  source: /note="Description of Combined DNA/RNA Molecule: Synthetic oligonucleotide"
gaaagagugucucaucuucuu

SEQ ID NO: 4255 - RNA, 23 nt, Artificial Sequence
  source: /note="Description of Artificial Sequence: Synthetic oligonucleotide"
aagaagaugagacacucuuucug

SEQ ID NO: 4256 - DNA, 21 bp, Artificial Sequence
  source: /note="Description of Artificial Sequence: Synthetic oligonucleotide"
  source: /note="Description of Combined DNA/RNA Molecule: Synthetic oligonucleotide"
gaaagagugucucatcuucuu

SEQ ID NO: 4257 - RNA, 23 nt, Artificial Sequence
  source: /note="Description of Artificial Sequence: Synthetic oligonucleotide"
aagaagaugagacacucuuucug

SEQ ID NO: 4258 - DNA, 21 bp, Artificial Sequence
  source: /note="Description of Artificial Sequence: Synthetic oligonucleotide"
  source: /note="Description of Combined DNA/RNA Molecule: Synthetic oligonucleotide"
gaaagagugucucaucuucuu

SEQ ID NO: 4259 - RNA, 23 nt, Artificial Sequence
  source: /note="Description of Artificial Sequence: Synthetic oligonucleotide"
aagaagaugagacacucuuucug

SEQ ID NO: 4260 - DNA, 21 bp, Artificial Sequence
  source: /note="Description of Artificial Sequence: Synthetic oligonucleotide"
  source: /note="Description of Combined DNA/RNA Molecule: Synthetic oligonucleotide"
gaaagagugucucaucutcuu

SEQ ID NO: 4261 - RNA, 23 nt, Artificial Sequence
  source: /note="Description of Artificial Sequence: Synthetic oligonucleotide"
aagaagaugagacacucuuucug

SEQ ID NO: 4262 - DNA, 21 bp, Artificial Sequence
  source: /note="Description of Artificial Sequence: Synthetic oligonucleotide"
  source: /note="Description of Combined DNA/RNA Molecule: Synthetic oligonucleotide"
gaaagagugucucaucuucuu

SEQ ID NO: 4263 - RNA, 23 nt, Artificial Sequence
  source: /note="Description of Artificial Sequence: Synthetic oligonucleotide"
aagaagaugagacacucuuucug

SEQ ID NO: 4264 - DNA, 21 bp, Artificial Sequence
  source: /note="Description of Artificial Sequence: Synthetic oligonucleotide"
  source: /note="Description of Combined DNA/RNA Molecule: Synthetic oligonucleotide"
gaaagagugucucaucuucut

SEQ ID NO: 4265 - RNA, 23 nt, Artificial Sequence
  source: /note="Description of Artificial Sequence: Synthetic oligonucleotide"
aagaagaugagacacucuuucug

SEQ ID NO: 4266 - DNA, 21 bp, Artificial Sequence
  source: /note="Description of Artificial Sequence: Synthetic oligonucleotide"
  source: /note="Description of Combined DNA/RNA Molecule: Synthetic oligonucleotide"
gaaagagugucucaucuucuu

SEQ ID NO: 4267 - RNA, 23 nt, Artificial Sequence
  source: /note="Description of Artificial Sequence: Synthetic oligonucleotide"
aagaagaugagacacucuuucug

SEQ ID NO: 4268 - DNA, 21 bp, Artificial Sequence
  source: /note="Description of Artificial Sequence: Synthetic oligonucleotide"
  source: /note="Description of Combined DNA/RNA Molecule: Synthetic oligonucleotide"
gaaagagugucucatcuucuu

SEQ ID NO: 4269 - RNA, 23 nt, Artificial Sequence
  source: /note="Description of Artificial Sequence: Synthetic oligonucleotide"
aagaagaugagacacucuuucug

SEQ ID NO: 4270 - DNA, 21 bp, Artificial Sequence
  source: /note="Description of Artificial Sequence: Synthetic oligonucleotide"
  source: /note="Description of Combined DNA/RNA Molecule: Synthetic oligonucleotide"
gaaagagugucucauctucuu

SEQ ID NO: 4271 - RNA, 23 nt, Artificial Sequence
  source: /note="Description of Artificial Sequence: Synthetic oligonucleotide"
aagaagaugagacacucuuucug

SEQ ID NO: 4272 - DNA, 21 bp, Artificial Sequence
  source: /note="Description of Artificial Sequence: Synthetic oligonucleotide"
  source: /note="Description of Combined DNA/RNA Molecule: Synthetic oligonucleotide"
gaaagagugucucauctucuu

SEQ ID NO: 4273 - RNA, 23 nt, Artificial Sequence
  source: /note="Description of Artificial Sequence: Synthetic oligonucleotide"
aagaagaugagacacucuuucug

SEQ ID NO: 4274 - DNA, 21 bp, Artificial Sequence
  source: /note="Description of Artificial Sequence: Synthetic oligonucleotide"
  source: /note="Description of Combined DNA/RNA Molecule: Synthetic oligonucleotide"
gaaagagugucucatctucuu

SEQ ID NO: 4275 - RNA, 23 nt, Artificial Sequence
  source: /note="Description of Artificial Sequence: Synthetic oligonucleotide"
aagaagaugagacacucuuucug

SEQ ID NO: 4276 - DNA, 21 bp, Artificial Sequence
  source: /note="Description of Artificial Sequence: Synthetic oligonucleotide"
  source: /note="Description of Combined DNA/RNA Molecule: Synthetic oligonucleotide"
gaaagagugucucatctucuu

SEQ ID NO: 4277 - RNA, 23 nt, Artificial Sequence
  source: /note="Description of Artificial Sequence: Synthetic oligonucleotide"
aagaagaugagacacucuuucug

SEQ ID NO: 4278 - RNA, 21 nt, Artificial Sequence
  source: /note="Description of Artificial Sequence: Synthetic oligonucleotide"
gaaagagugucucaucuucuu

SEQ ID NO: 4279 - DNA, 23 bp, Artificial Sequence
  source: /note="Description of Artificial Sequence: Synthetic oligonucleotide"
  source: /note="Description of Combined DNA/RNA Molecule: Synthetic oligonucleotide"
aagaagatgagacacucuuucug

SEQ ID NO: 4280 - RNA, 21 nt, Artificial Sequence
  source: /note="Description of Artificial Sequence: Synthetic oligonucleotide"
gaaagagugucucaucuucuu

SEQ ID NO: 4281 - DNA, 23 bp, Artificial Sequence
  source: /note="Description of Artificial Sequence: Synthetic oligonucleotide"
  source: /note="Description of Combined DNA/RNA Molecule: Synthetic oligonucleotide"
aagaagaugagacactcuuucug

SEQ ID NO: 4282 - RNA, 21 nt, Artificial Sequence
  source: /note="Description of Artificial Sequence: Synthetic oligonucleotide"
gaaagagugucucaucuucuu

SEQ ID NO: 4283 - DNA, 23 bp, Artificial Sequence
  source: /note="Description of Artificial Sequence: Synthetic oligonucleotide"
  source: /note="Description of Combined DNA/RNA Molecule: Synthetic oligonucleotide"
aagaagaugagacacuctuucug

SEQ ID NO: 4284 - RNA, 21 nt, Artificial Sequence
  source: /note="Description of Artificial Sequence: Synthetic oligonucleotide"
gaaagagugucucaucuucuu

SEQ ID NO: 4285 - DNA, 23 bp, Artificial Sequence
  source: /note="Description of Artificial Sequence: Synthetic oligonucleotide"
  source: /note="Description of Combined DNA/RNA Molecule: Synthetic oligonucleotide"
aagaagatgagacactcuuucug

SEQ ID NO: 4286 - RNA, 21 nt, Artificial Sequence
  source: /note="Description of Artificial Sequence: Synthetic oligonucleotide"
gaaagagugucucaucuucuu

SEQ ID NO: 4287 - DNA, 23 bp, Artificial Sequence
  source: /note="Description of Artificial Sequence: Synthetic oligonucleotide"
  source: /note="Description of Combined DNA/RNA Molecule: Synthetic oligonucleotide"
aagaagatgagacacuctuucug

SEQ ID NO: 4288 - RNA, 21 nt, Artificial Sequence
  source: /note="Description of Artificial Sequence: Synthetic oligonucleotide"
gaaagagugucucaucuucuu

SEQ ID NO: 4289 - DNA, 23 bp, Artificial Sequence
  source: /note="Description of Artificial Sequence: Synthetic oligonucleotide"
  source: /note="Description of Combined DNA/RNA Molecule: Synthetic oligonucleotide"
aagaagatgagacacucuuucug

SEQ ID NO: 4290 - RNA, 21 nt, Artificial Sequence
  source: /note="Description of Artificial Sequence: Synthetic oligonucleotide"
gaaagagugucucaucuucuu

SEQ ID NO: 4291 - DNA, 23 bp, Artificial Sequence
  source: /note="Description of Artificial Sequence: Synthetic oligonucleotide"
  source: /note="Description of Combined DNA/RNA Molecule: Synthetic oligonucleotide"
aagaagaugagacactcuuucug

SEQ ID NO: 4292 - RNA, 21 nt, Artificial Sequence
  source: /note="Description of Artificial Sequence: Synthetic oligonucleotide"
gaaagagugucucaucuucuu

SEQ ID NO: 4293 - DNA, 23 bp, Artificial Sequence
  source: /note="Description of Artificial Sequence: Synthetic oligonucleotide"
  source: /note="Description of Combined DNA/RNA Molecule: Synthetic oligonucleotide"
aagaagaugagacacuctuucug

SEQ ID NO: 4294 - DNA, 21 bp, Artificial Sequence
  source: /note="Description of Artificial Sequence: Synthetic oligonucleotide"
  source: /note="Description of Combined DNA/RNA Molecule: Synthetic oligonucleotide"
gaaagagugtcucaucuucuu

SEQ ID NO: 4295 - RNA, 23 nt, Artificial Sequence
  source: /note="Description of Artificial Sequence: Synthetic oligonucleotide"
aagaagaugagacacucuuucug

SEQ ID NO: 4296 - DNA, 21 bp, Artificial Sequence
  source: /note="Description of Artificial Sequence: Synthetic oligonucleotide"
  source: /note="Description of Combined DNA/RNA Molecule: Synthetic oligonucleotide"
gaaagaguguctcaucuucuu

SEQ ID NO: 4297 - RNA, 23 nt, Artificial Sequence
  source: /note="Description of Artificial Sequence: Synthetic oligonucleotide"
aagaagaugagacacucuuucug

SEQ ID NO: 4298 - RNA, 21 nt, Artificial Sequence
  source: /note="Description of Artificial Sequence: Synthetic oligonucleotide"
gaaagagugucucaucuucuu

SEQ ID NO: 4299 - RNA, 23 nt, Artificial Sequence
  source: /note="Description of Artificial Sequence: Synthetic oligonucleotide"
aagaagaugagacacucuuucug

SEQ ID NO: 4300 - DNA, 21 bp, Artificial Sequence
  source: /note="Description of Artificial Sequence: Synthetic oligonucleotide"
  source: /note="Description of Combined DNA/RNA Molecule: Synthetic oligonucleotide"
gaaagagugucucatcuucuu

SEQ ID NO: 4301 - RNA, 23 nt, Artificial Sequence
  source: /note="Description of Artificial Sequence: Synthetic oligonucleotide"
aagaagaugagacacucuuucug

SEQ ID NO: 4302 - DNA, 21 bp, Artificial Sequence
  source: /note="Description of Artificial Sequence: Synthetic oligonucleotide"
  source: /note="Description of Combined DNA/RNA Molecule: Synthetic oligonucleotide"
gaaagagugucucauctucuu

SEQ ID NO: 4303 - RNA, 23 nt, Artificial Sequence
  source: /note="Description of Artificial Sequence: Synthetic oligonucleotide"
aagaagaugagacacucuuucug

SEQ ID NO: 4304 - DNA, 21 bp, Artificial Sequence
  source: /note="Description of Artificial Sequence: Synthetic oligonucleotide"
  source: /note="Description of Combined DNA/RNA Molecule: Synthetic oligonucleotide"
gaaagagugucucaucutcuu

SEQ ID NO: 4305 - RNA, 23 nt, Artificial Sequence
  source: /note="Description of Artificial Sequence: Synthetic oligonucleotide"
aagaagaugagacacucuuucug

SEQ ID NO: 4306 - DNA, 21 bp, Artificial Sequence
  source: /note="Description of Artificial Sequence: Synthetic oligonucleotide"
  source: /note="Description of Combined DNA/RNA Molecule: Synthetic oligonucleotide"
gaaagagugucucaucuuctu

SEQ ID NO: 4307 - RNA, 23 nt, Artificial Sequence
  source: /note="Description of Artificial Sequence: Synthetic oligonucleotide"
aagaagaugagacacucuuucug

SEQ ID NO: 4308 - RNA, 21 nt, Artificial Sequence
  source: /note="Description of Artificial Sequence: Synthetic oligonucleotide"
gaaagagugucucaucuucua

SEQ ID NO: 4309 - RNA, 23 nt, Artificial Sequence
  source: /note="Description of Artificial Sequence: Synthetic oligonucleotide"
uagaagaugagacacucuuucug

SEQ ID NO: 4310 - RNA, 21 nt, Artificial Sequence
  source: /note="Description of Artificial Sequence: Synthetic oligonucleotide"
caaagagugucucaucuucuu

SEQ ID NO: 4311 - RNA, 23 nt, Artificial Sequence
  source: /note="Description of Artificial Sequence: Synthetic oligonucleotide"
aagaagaugagacacucuuugac

SEQ ID NO: 4312 - RNA, 21 nt, Artificial Sequence
  source: /note="Description of Artificial Sequence: Synthetic oligonucleotide"
cuaagagugucucaucuucuu

SEQ ID NO: 4313 - RNA, 23 nt, Artificial Sequence
  source: /note="Description of Artificial Sequence: Synthetic oligonucleotide"
aagaagaugagacacucuuagac

SEQ ID NO: 4314 - RNA, 21 nt, Artificial Sequence
  source: /note="Description of Artificial Sequence: Synthetic oligonucleotide"
cuuagagugucucaucuucuu

SEQ ID NO: 4315 - RNA, 23 nt, Artificial Sequence
  source: /note="Description of Artificial Sequence: Synthetic oligonucleotide"
aagaagaugagacacucuaagac

SEQ ID NO: 4316 - RNA, 21 nt, Artificial Sequence
  source: /note="Description of Artificial Sequence: Synthetic oligonucleotide"
cuuagagugucucaucuucuu

SEQ ID NO: 4317 - RNA, 23 nt, Artificial Sequence
  source: /note="Description of Artificial Sequence: Synthetic oligonucleotide"
aagaagaugagacacucuaagug

SEQ ID NO: 4318 - RNA, 21 nt, Artificial Sequence
  source: /note="Description of Artificial Sequence: Synthetic oligonucleotide"
guuugagugucucaucuucuu

SEQ ID NO: 4319 - RNA, 23 nt, Artificial Sequence
  source: /note="Description of Artificial Sequence: Synthetic oligonucleotide"
aagaagaugagacacucaaacug

SEQ ID NO: 4320 - RNA, 21 nt, Artificial Sequence
  source: /note="Description of Artificial Sequence: Synthetic oligonucleotide"
gauucagugucucaucuucuu

SEQ ID NO: 4321 - RNA, 23 nt, Artificial Sequence
  source: /note="Description of Artificial Sequence: Synthetic oligonucleotide"
aagaagaugagacacugaaucug

SEQ ID NO: 4322 - RNA, 21 nt, Artificial Sequence
  source: /note="Description of Artificial Sequence: Synthetic oligonucleotide"
gaaucugugucucaucuucuu

SEQ ID NO: 4323 - RNA, 23 nt, Artificial Sequence
  source: /note="Description of Artificial Sequence: Synthetic oligonucleotide"
aagaagaugagacacagauucug

SEQ ID NO: 4324 - RNA, 21 nt, Artificial Sequence
  source: /note="Description of Artificial Sequence: Synthetic oligonucleotide"
gaaagagugucucaucuucuu

SEQ ID NO: 4325 - RNA, 23 nt, Artificial Sequence
  source: /note="Description of Artificial Sequence: Synthetic oligonucleotide"
aagaagaugagacacucuuucug

SEQ ID NO: 4326 - RNA, 21 nt, Artificial Sequence
  source: /note="Description of Artificial Sequence: Synthetic oligonucleotide"
gaaagagugucucaucuucuu

SEQ ID NO: 4327 - RNA, 23 nt, Artificial Sequence
  source: /note="Description of Artificial Sequence: Synthetic oligonucleotide"
aagaagaugagacacucuuucug

SEQ ID NO: 4328 - RNA, 21 nt, Artificial Sequence
  source: /note="Description of Artificial Sequence: Synthetic oligonucleotide"
gaaagagugucucaucuucuu

SEQ ID NO: 4329 - RNA, 23 nt, Artificial Sequence
  source: /note="Description of Artificial Sequence: Synthetic oligonucleotide"
aagaagaugagacacucuuucug

SEQ ID NO: 4330 - RNA, 21 nt, Artificial Sequence
  source: /note="Description of Artificial Sequence: Synthetic oligonucleotide"
gaaagagugucucaucuucuu

SEQ ID NO: 4331 - RNA, 23 nt, Artificial Sequence
  source: /note="Description of Artificial Sequence: Synthetic oligonucleotide"
aagaagaugagacacucuuucug

SEQ ID NO: 4332 - RNA, 21 nt, Artificial Sequence
  source: /note="Description of Artificial Sequence: Synthetic oligonucleotide"
gaaagagugucucaucuucuu

SEQ ID NO: 4333 - RNA, 23 nt, Artificial Sequence
  source: /note="Description of Artificial Sequence: Synthetic oligonucleotide"
aagaagaugagacacucuuucug

SEQ ID NO: 4334 - RNA, 21 nt, Artificial Sequence
  source: /note="Description of Artificial Sequence: Synthetic oligonucleotide"
gaaagagugucucaucuucuu

SEQ ID NO: 4335 - RNA, 23 nt, Artificial Sequence
  source: /note="Description of Artificial Sequence: Synthetic oligonucleotide"
aagaagaugagacacucuuucug

SEQ ID NO: 4336 - RNA, 21 nt, Artificial Sequence
  source: /note="Description of Artificial Sequence: Synthetic oligonucleotide"
gaaagagugucucaucuucuu

SEQ ID NO: 4337 - DNA, 23 bp, Artificial Sequence
  source: /note="Description of Artificial Sequence: Synthetic oligonucleotide"
  source: /note="Description of Combined DNA/RNA Molecule: Synthetic oligonucleotide"
aagaagatgagacacucuuucug

SEQ ID NO: 4338 - RNA, 21 nt, Artificial Sequence
  source: /note="Description of Artificial Sequence: Synthetic oligonucleotide"
gaaagagugucucaucuucuu

SEQ ID NO: 4339 - RNA, 23 nt, Artificial Sequence
  source: /note="Description of Artificial Sequence: Synthetic oligonucleotide"
aagaagaugagacacucuuucug

SEQ ID NO: 4340 - RNA, 21 nt, Artificial Sequence
  source: /note="Description of Artificial Sequence: Synthetic oligonucleotide"
gaaagagugucucaucuucuu

SEQ ID NO: 4341 - RNA, 23 nt, Artificial Sequence
  source: /note="Description of Artificial Sequence: Synthetic oligonucleotide"
aagaagaugagacacucuuucug

SEQ ID NO: 4342 - RNA, 21 nt, Artificial Sequence
  source: /note="Description of Artificial Sequence: Synthetic oligonucleotide"
gaaagagugucucaucuucuu

SEQ ID NO: 4343 - RNA, 23 nt, Artificial Sequence
  source: /note="Description of Artificial Sequence: Synthetic oligonucleotide"
aagaagaugagacacucuuucug

SEQ ID NO: 4344 - RNA, 21 nt, Artificial Sequence
  source: /note="Description of Artificial Sequence: Synthetic oligonucleotide"
gaaagagugucucaucuucuu

SEQ ID NO: 4345 - RNA, 23 nt, Artificial Sequence
  source: /note="Description of Artificial Sequence: Synthetic oligonucleotide"
aagaagaugagacacucuuucug

SEQ ID NO: 4346 - DNA, 21 bp, Artificial Sequence
  source: /note="Description of Artificial Sequence: Synthetic oligonucleotide"
  source: /note="Description of Combined DNA/RNA Molecule: Synthetic oligonucleotide"
gaaagagugucucaucuucut

SEQ ID NO: 4347 - RNA, 23 nt, Artificial Sequence
  source: /note="Description of Artificial Sequence: Synthetic oligonucleotide"
aagaagaugagacacucuuucug

SEQ ID NO: 4348 - DNA, 21 bp, Artificial Sequence
  source: /note="Description of Artificial Sequence: Synthetic oligonucleotide"
  source: /note="Description of Combined DNA/RNA Molecule: Synthetic oligonucleotide"
gaaagagugucucaucuuctu

SEQ ID NO: 4349 - RNA, 23 nt, Artificial Sequence
  source: /note="Description of Artificial Sequence: Synthetic oligonucleotide"
aagaagaugagacacucuuucug

SEQ ID NO: 4350 - RNA, 21 nt, Artificial Sequence
  source: /note="Description of Artificial Sequence: Synthetic oligonucleotide"
gaaagagugucucaucuucuu

SEQ ID NO: 4351 - RNA, 23 nt, Artificial Sequence
  source: /note="Description of Artificial Sequence: Synthetic oligonucleotide"
aagaagaugagacacucuuucug

SEQ ID NO: 4352 - DNA, 21 bp, Artificial Sequence
  source: /note="Description of Artificial Sequence: Synthetic oligonucleotide"
  source: /note="Description of Combined DNA/RNA Molecule: Synthetic oligonucleotide"
gaaagagugucucaucutcuu

SEQ ID NO: 4353 - RNA, 23 nt, Artificial Sequence
  source: /note="Description of Artificial Sequence: Synthetic oligonucleotide"
aagaagaugagacacucuuucug

SEQ ID NO: 4354 - DNA, 21 bp, Artificial Sequence
  source: /note="Description of Artificial Sequence: Synthetic oligonucleotide"
  source: /note="Description of Combined DNA/RNA Molecule: Synthetic oligonucleotide"
gaaagagugucucauctucuu

SEQ ID NO: 4355 - RNA, 23 nt, Artificial Sequence
  source: /note="Description of Artificial Sequence: Synthetic oligonucleotide"
aagaagaugagacacucuuucug

SEQ ID NO: 4356 - RNA, 21 nt, Artificial Sequence
  source: /note="Description of Artificial Sequence: Synthetic oligonucleotide"
gaaagagugucucaucuucuu

SEQ ID NO: 4357 - RNA, 23 nt, Artificial Sequence
  source: /note="Description of Artificial Sequence: Synthetic oligonucleotide"
aagaagaugagacacucuuucug

SEQ ID NO: 4358 - DNA, 21 bp, Artificial Sequence
  source: /note="Description of Artificial Sequence: Synthetic oligonucleotide"
  source: /note="Description of Combined DNA/RNA Molecule: Synthetic oligonucleotide"
gaaagagugucucatcuucuu

SEQ ID NO: 4359 - RNA, 23 nt, Artificial Sequence
  source: /note="Description of Artificial Sequence: Synthetic oligonucleotide"
aagaagaugagacacucuuucug

SEQ ID NO: 4360 - RNA, 21 nt, Artificial Sequence
  source: /note="Description of Artificial Sequence: Synthetic oligonucleotide"
gaaagagugucucaucuucuu

SEQ ID NO: 4361 - RNA, 23 nt, Artificial Sequence
  source: /note="Description of Artificial Sequence: Synthetic oligonucleotide"
aagaagaugagacacucuuucug

SEQ ID NO: 4362 - RNA, 21 nt, Artificial Sequence
  source: /note="Description of Artificial Sequence: Synthetic oligonucleotide"
gaaagagugucucaucuucuu

SEQ ID NO: 4363 - RNA, 23 nt, Artificial Sequence
  source: /note="Description of Artificial Sequence: Synthetic oligonucleotide"
aagaagaugagacacucuuucug

SEQ ID NO: 4364 - DNA, 21 bp, Artificial Sequence
  source: /note="Description of Artificial Sequence: Synthetic oligonucleotide"
  source: /note="Description of Combined DNA/RNA Molecule: Synthetic oligonucleotide"
gaaagaguguctcaucuucuu

SEQ ID NO: 4365 - RNA, 23 nt, Artificial Sequence
  source: /note="Description of Artificial Sequence: Synthetic oligonucleotide"
aagaagaugagacacucuuucug

SEQ ID NO: 4366 - RNA, 21 nt, Artificial Sequence
  source: /note="Description of Artificial Sequence: Synthetic oligonucleotide"
gaaagagugucucaucuucuu

SEQ ID NO: 4367 - RNA, 23 nt, Artificial Sequence
  source: /note="Description of Artificial Sequence: Synthetic oligonucleotide"
aagaagaugagacacucuuucug

SEQ ID NO: 4368 - DNA, 21 bp, Artificial Sequence
  source: /note="Description of Artificial Sequence: Synthetic oligonucleotide"
  source: /note="Description of Combined DNA/RNA Molecule: Synthetic oligonucleotide"
gaaagagugtcucaucuucuu

SEQ ID NO: 4369 - RNA, 23 nt, Artificial Sequence
  source: /note="Description of Artificial Sequence: Synthetic oligonucleotide"
aagaagaugagacacucuuucug

SEQ ID NO: 4370 - RNA, 21 nt, Artificial Sequence
  source: /note="Description of Artificial Sequence: Synthetic oligonucleotide"
gaaagagugucucaucuucuu

SEQ ID NO: 4371 - RNA, 23 nt, Artificial Sequence
  source: /note="Description of Artificial Sequence: Synthetic oligonucleotide"
aagaagaugagacacucuuucug

SEQ ID NO: 4372 - DNA, 21 bp, Artificial Sequence
  source: /note="Description of Artificial Sequence: Synthetic oligonucleotide"
  source: /note="Description of Combined DNA/RNA Molecule: Synthetic oligonucleotide"
gaaagagugucucaucutcuu

SEQ ID NO: 4373 - RNA, 23 nt, Artificial Sequence
  source: /note="Description of Artificial Sequence: Synthetic oligonucleotide"
aagaagaugagacacucuuucug

SEQ ID NO: 4374 - DNA, 21 bp, Artificial Sequence
  source: /note="Description of Artificial Sequence: Synthetic oligonucleotide"
  source: /note="Description of Combined DNA/RNA Molecule: Synthetic oligonucleotide"
gaaagagugucucauctucuu

SEQ ID NO: 4375 - RNA, 23 nt, Artificial Sequence
  source: /note="Description of Artificial Sequence: Synthetic oligonucleotide"
aagaagaugagacacucuuucug

SEQ ID NO: 4376 - RNA, 21 nt, Artificial Sequence
  source: /note="Description of Artificial Sequence: Synthetic oligonucleotide"
gaaagagugucucaucuucuu

SEQ ID NO: 4377 - RNA, 23 nt, Artificial Sequence
  source: /note="Description of Artificial Sequence: Synthetic oligonucleotide"
aagaagaugagacacucuuucug

SEQ ID NO: 4378 - DNA, 21 bp, Artificial Sequence
  source: /note="Description of Artificial Sequence: Synthetic oligonucleotide"
  source: /note="Description of Combined DNA/RNA Molecule: Synthetic oligonucleotide"
gaaagagugucucatcuucuu

SEQ ID NO: 4379 - RNA, 23 nt, Artificial Sequence
  source: /note="Description of Artificial Sequence: Synthetic oligonucleotide"
aagaagaugagacacucuuucug

SEQ ID NO: 4380 - RNA, 21 nt, Artificial Sequence
  source: /note="Description of Artificial Sequence: Synthetic oligonucleotide"
gaaagagugucucaucuucuu

SEQ ID NO: 4381 - DNA, 23 bp, Artificial Sequence
  source: /note="Description of Artificial Sequence: Synthetic oligonucleotide"
  source: /note="Description of Combined DNA/RNA Molecule: Synthetic oligonucleotide"
aagaagatgagacacucuuucug

SEQ ID NO: 4382 - RNA, 21 nt, Artificial Sequence
  source: /note="Description of Artificial Sequence: Synthetic oligonucleotide"
gaaagagugucucaucuucuu

SEQ ID NO: 4383 - RNA, 23 nt, Artificial Sequence
  source: /note="Description of Artificial Sequence: Synthetic oligonucleotide"
aagaagaugagacacucuuucug

SEQ ID NO: 4384 - DNA, 21 bp, Artificial Sequence
  source: /note="Description of Artificial Sequence: Synthetic oligonucleotide"
  source: /note="Description of Combined DNA/RNA Molecule: Synthetic oligonucleotide"
gaaagaguguctcaucuucuu

SEQ ID NO: 4385 - RNA, 23 nt, Artificial Sequence
  source: /note="Description of Artificial Sequence: Synthetic oligonucleotide"
aagaagaugagacacucuuucug

SEQ ID NO: 4386 - RNA, 21 nt, Artificial Sequence
  source: /note="Description of Artificial Sequence: Synthetic oligonucleotide"
gaaagagugucucaucuucuu

SEQ ID NO: 4387 - RNA, 23 nt, Artificial Sequence
  source: /note="Description of Artificial Sequence: Synthetic oligonucleotide"
aagaagaugagacacucuuucug

SEQ ID NO: 4388 - DNA, 21 bp, Artificial Sequence
  source: /note="Description of Artificial Sequence: Synthetic oligonucleotide"
  source: /note="Description of Combined DNA/RNA Molecule: Synthetic oligonucleotide"
gaaagagugtcucaucuucuu

SEQ ID NO: 4389 - RNA, 23 nt, Artificial Sequence
  source: /note="Description of Artificial Sequence: Synthetic oligonucleotide"
aagaagaugagacacucuuucug

SEQ ID NO: 4390 - RNA, 21 nt, Artificial Sequence
  source: /note="Description of Artificial Sequence: Synthetic oligonucleotide"
gaaagagugucucaucuucuu

SEQ ID NO: 4391 - RNA, 23 nt, Artificial Sequence
  source: /note="Description of Artificial Sequence: Synthetic oligonucleotide"
aagaagaugagacacucuuucug

SEQ ID NO: 4392 - RNA, 21 nt, Artificial Sequence
  source: /note="Description of Artificial Sequence: Synthetic oligonucleotide"
gaaagagugucucaucuucuu

SEQ ID NO: 4393 - RNA, 23 nt, Artificial Sequence
  source: /note="Description of Artificial Sequence: Synthetic oligonucleotide"
aagaagaugagacacucuuucug

SEQ ID NO: 4394 - RNA, 21 nt, Artificial Sequence
  source: /note="Description of Artificial Sequence: Synthetic oligonucleotide"
gaaagagugucucaucuucuu

SEQ ID NO: 4395 - RNA, 23 nt, Artificial Sequence
  source: /note="Description of Artificial Sequence: Synthetic oligonucleotide"
aagaagaugagacacucuuucug

SEQ ID NO: 4396 - RNA, 21 nt, Artificial Sequence
  source: /note="Description of Artificial Sequence: Synthetic oligonucleotide"
gaaagagugucucaucuucuu

SEQ ID NO: 4397 - RNA, 23 nt, Artificial Sequence
  source: /note="Description of Artificial Sequence: Synthetic oligonucleotide"
aagaagaugagacacucuuucug

SEQ ID NO: 4398 - RNA, 21 nt, Artificial Sequence
  source: /note="Description of Artificial Sequence: Synthetic oligonucleotide"
gaaagagugucucaucuucuu

SEQ ID NO: 4399 - RNA, 23 nt, Artificial Sequence
  source: /note="Description of Artificial Sequence: Synthetic oligonucleotide"
aagaagaugagacacucuuucug

SEQ ID NO: 4400 - RNA, 21 nt, Artificial Sequence
  source: /note="Description of Artificial Sequence: Synthetic oligonucleotide"
gaaagagugucucaucuucuu

SEQ ID NO: 4401 - RNA, 23 nt, Artificial Sequence
  source: /note="Description of Artificial Sequence: Synthetic oligonucleotide"
aagaagaugagacacucuuucug

SEQ ID NO: 4402 - RNA, 21 nt, Artificial Sequence
  source: /note="Description of Artificial Sequence: Synthetic oligonucleotide"
gaaagagugucucaucuucuu

SEQ ID NO: 4403 - RNA, 23 nt, Artificial Sequence
  source: /note="Description of Artificial Sequence: Synthetic oligonucleotide"
aagaagaugagacacucuuucug

SEQ ID NO: 4404 - RNA, 21 nt, Artificial Sequence
  source: /note="Description of Artificial Sequence: Synthetic oligonucleotide"
gaaagagugucucaucuucuu

SEQ ID NO: 4405 - RNA, 23 nt, Artificial Sequence
  source: /note="Description of Artificial Sequence: Synthetic oligonucleotide"
aagaagaugagacacucuuucug

SEQ ID NO: 4406 - RNA, 21 nt, Artificial Sequence
  source: /note="Description of Artificial Sequence: Synthetic oligonucleotide"
gaaagagugucucaucuucuu

SEQ ID NO: 4407 - RNA, 23 nt, Artificial Sequence
  source: /note="Description of Artificial Sequence: Synthetic oligonucleotide"
aagaagaugagacacucuuucug

SEQ ID NO: 4408 - RNA, 21 nt, Artificial Sequence
  source: /note="Description of Artificial Sequence: Synthetic oligonucleotide"
gaaagagugucucaucuucuu

SEQ ID NO: 4409 - RNA, 23 nt, Artificial Sequence
  source: /note="Description of Artificial Sequence: Synthetic oligonucleotide"
aagaagaugagacacucuuucug

SEQ ID NO: 4410 - RNA, 21 nt, Artificial Sequence
  source: /note="Description of Artificial Sequence: Synthetic oligonucleotide"
gaaagagugucucaucuucuu

SEQ ID NO: 4411 - RNA, 23 nt, Artificial Sequence
  source: /note="Description of Artificial Sequence: Synthetic oligonucleotide"
aagaagaugagacacucuuucug

SEQ ID NO: 4412 - RNA, 21 nt, Artificial Sequence
  source: /note="Description of Artificial Sequence: Synthetic oligonucleotide"
gaaagagugucucaucuucuu

SEQ ID NO: 4413 - RNA, 23 nt, Artificial Sequence
  source: /note="Description of Artificial Sequence: Synthetic oligonucleotide"
aagaagaugagacacucuuucug

SEQ ID NO: 4414 - RNA, 21 nt, Artificial Sequence
  source: /note="Description of Artificial Sequence: Synthetic oligonucleotide"
gaaagagugucucaucuucuu

SEQ ID NO: 4415 - RNA, 23 nt, Artificial Sequence
  source: /note="Description of Artificial Sequence: Synthetic oligonucleotide"
aagaagaugagacacucuuucug

SEQ ID NO: 4416 - RNA, 21 nt, Artificial Sequence
  source: /note="Description of Artificial Sequence: Synthetic oligonucleotide"
gaaagagugucucaucuucuu

SEQ ID NO: 4417 - RNA, 23 nt, Artificial Sequence
  source: /note="Description of Artificial Sequence: Synthetic oligonucleotide"
aagaagaugagacacucuuucug

SEQ ID NO: 4418 - RNA, 21 nt, Artificial Sequence
  source: /note="Description of Artificial Sequence: Synthetic oligonucleotide"
gaaagagugucucaucuucuu

SEQ ID NO: 4419 - RNA, 23 nt, Artificial Sequence
  source: /note="Description of Artificial Sequence: Synthetic oligonucleotide"
aagaagaugagacacucuuucug

SEQ ID NO: 4420 - RNA, 21 nt, Artificial Sequence
  source: /note="Description of Artificial Sequence: Synthetic oligonucleotide"
gaaagagugucucaucuucuu

SEQ ID NO: 4421 - RNA, 23 nt, Artificial Sequence
  source: /note="Description of Artificial Sequence: Synthetic oligonucleotide"
aagaagaugagacacucuuucug

SEQ ID NO: 4422 - RNA, 21 nt, Artificial Sequence
  source: /note="Description of Artificial Sequence: Synthetic oligonucleotide"
gaaagagugucucaucuucuu

SEQ ID NO: 4423 - RNA, 23 nt, Artificial Sequence
  source: /note="Description of Artificial Sequence: Synthetic oligonucleotide"
aagaagaugagacacucuuucug

SEQ ID NO: 4424 - RNA, 21 nt, Artificial Sequence
  source: /note="Description of Artificial Sequence: Synthetic oligonucleotide"
gaaagagugucucaucuucuu

SEQ ID NO: 4425 - RNA, 23 nt, Artificial Sequence
  source: /note="Description of Artificial Sequence: Synthetic oligonucleotide"
aagaagaugagacacucuuucug

SEQ ID NO: 4426 - RNA, 21 nt, Artificial Sequence
  source: /note="Description of Artificial Sequence: Synthetic oligonucleotide"
gaaagagugucucaucuucuu

SEQ ID NO: 4427 - RNA, 23 nt, Artificial Sequence
  source: /note="Description of Artificial Sequence: Synthetic oligonucleotide"
aagaagaugagacacucuuucug

SEQ ID NO: 4428 - DNA, 21 bp, Artificial Sequence
  source: /note="Description of Artificial Sequence: Synthetic oligonucleotide"
  source: /note="Description of Combined DNA/RNA Molecule: Synthetic oligonucleotide"
gaaagagugtcucaucuucuu

SEQ ID NO: 4429 - RNA, 23 nt, Artificial Sequence
  source: /note="Description of Artificial Sequence: Synthetic oligonucleotide"
aagaagaugagacacucuuucug

SEQ ID NO: 4430 - DNA, 21 bp, Artificial Sequence
  source: /note="Description of Artificial Sequence: Synthetic oligonucleotide"
  source: /note="Description of Combined DNA/RNA Molecule: Synthetic oligonucleotide"
gaaagagugtcucaucuucuu

SEQ ID NO: 4431 - RNA, 23 nt, Artificial Sequence
  source: /note="Description of Artificial Sequence: Synthetic oligonucleotide"
aagaagaugagacacucuuucug

SEQ ID NO: 4432 - DNA, 21 bp, Artificial Sequence
  source: /note="Description of Artificial Sequence: Synthetic oligonucleotide"
  source: /note="Description of Combined DNA/RNA Molecule: Synthetic oligonucleotide"
gaaagagugtcucaucuucuu

SEQ ID NO: 4433 - RNA, 23 nt, Artificial Sequence
  source: /note="Description of Artificial Sequence: Synthetic oligonucleotide"
aagaagaugagacacucuuucug

SEQ ID NO: 4434 - DNA, 21 bp, Artificial Sequence
  source: /note="Description of Artificial Sequence: Synthetic oligonucleotide"
  source: /note="Description of Combined DNA/RNA Molecule: Synthetic oligonucleotide"
gaaagagugtcucaucuucuu

SEQ ID NO: 4435 - RNA, 23 nt, Artificial Sequence
  source: /note="Description of Artificial Sequence: Synthetic oligonucleotide"
aagaagaugagacacucuuucug

SEQ ID NO: 4436 - DNA, 21 bp, Artificial Sequence
  source: /note="Description of Artificial Sequence: Synthetic oligonucleotide"
  source: /note="Description of Combined DNA/RNA Molecule: Synthetic oligonucleotide"
gaaagagugtcucaucuucuu

SEQ ID NO: 4437 - RNA, 23 nt, Artificial Sequence
  source: /note="Description of Artificial Sequence: Synthetic oligonucleotide"
aagaagaugagacacucuuucug

SEQ ID NO: 4438 - DNA, 21 bp, Artificial Sequence
  source: /note="Description of Artificial Sequence: Synthetic oligonucleotide"
  source: /note="Description of Combined DNA/RNA Molecule: Synthetic oligonucleotide"
gaaagagugucucauctucuu

SEQ ID NO: 4439 - RNA, 23 nt, Artificial Sequence
  source: /note="Description of Artificial Sequence: Synthetic oligonucleotide"
aagaagaugagacacucuuucug

SEQ ID NO: 4440 - DNA, 21 bp, Artificial Sequence
  source: /note="Description of Artificial Sequence: Synthetic oligonucleotide"
  source: /note="Description of Combined DNA/RNA Molecule: Synthetic oligonucleotide"
gaaagagugucucauctucuu

SEQ ID NO: 4441 - RNA, 23 nt, Artificial Sequence
  source: /note="Description of Artificial Sequence: Synthetic oligonucleotide"
aagaagaugagacacucuuucug

SEQ ID NO: 4442 - DNA, 21 bp, Artificial Sequence
  source: /note="Description of Artificial Sequence: Synthetic oligonucleotide"
  source: /note="Description of Combined DNA/RNA Molecule: Synthetic oligonucleotide"
gaaagagugucucauctucuu

SEQ ID NO: 4443 - RNA, 23 nt, Artificial Sequence
  source: /note="Description of Artificial Sequence: Synthetic oligonucleotide"
aagaagaugagacacucuuucug

SEQ ID NO: 4444 - DNA, 21 bp, Artificial Sequence
  source: /note="Description of Artificial Sequence: Synthetic oligonucleotide"
  source: /note="Description of Combined DNA/RNA Molecule: Synthetic oligonucleotide"
gaaagagugucucauctucuu

SEQ ID NO: 4445 - RNA, 23 nt, Artificial Sequence
  source: /note="Description of Artificial Sequence: Synthetic oligonucleotide"
aagaagaugagacacucuuucug

SEQ ID NO: 4446 - DNA, 21 bp, Artificial Sequence
  source: /note="Description of Artificial Sequence: Synthetic oligonucleotide"
  source: /note="Description of Combined DNA/RNA Molecule: Synthetic oligonucleotide"
gaaagagugucucauctucuu

SEQ ID NO: 4447 - RNA, 23 nt, Artificial Sequence
  source: /note="Description of Artificial Sequence: Synthetic oligonucleotide"
aagaagaugagacacucuuucug

SEQ ID NO: 4448 - RNA, 21 nt, Artificial Sequence
  source: /note="Description of Artificial Sequence: Synthetic oligonucleotide"
gaaagagugucucaucuucuu

SEQ ID NO: 4449 - RNA, 23 nt, Artificial Sequence
  source: /note="Description of Artificial Sequence: Synthetic oligonucleotide"
aagaagaugagacacucuuucug

SEQ ID NO: 4450 - RNA, 21 nt, Artificial Sequence
  source: /note="Description of Artificial Sequence: Synthetic oligonucleotide"
gaaagagugucucaucuucuu

SEQ ID NO: 4451 - RNA, 23 nt, Artificial Sequence
  source: /note="Description of Artificial Sequence: Synthetic oligonucleotide"
aagaagaugagacacucuuucug

SEQ ID NO: 4452 - RNA, 21 nt, Artificial Sequence
  source: /note="Description of Artificial Sequence: Synthetic oligonucleotide"
gaaagagugucucaucuucuu

SEQ ID NO: 4453 - RNA, 23 nt, Artificial Sequence
  source: /note="Description of Artificial Sequence: Synthetic oligonucleotide"
aagaagaugagacacucuuucug

SEQ ID NO: 4454 - DNA, 21 bp, Artificial Sequence
  source: /note="Description of Artificial Sequence: Synthetic oligonucleotide"
  source: /note="Description of Combined DNA/RNA Molecule: Synthetic oligonucleotide"
gaaagagugtcucaucuucuu

SEQ ID NO: 4455 - RNA, 23 nt, Artificial Sequence
  source: /note="Description of Artificial Sequence: Synthetic oligonucleotide"
aagaagaugagacacucuuucug

SEQ ID NO: 4456 - DNA, 21 bp, Artificial Sequence
  source: /note="Description of Artificial Sequence: Synthetic oligonucleotide"
  source: /note="Description of Combined DNA/RNA Molecule: Synthetic oligonucleotide"
gaaagagugucucauctucuu

SEQ ID NO: 4457 - RNA, 23 nt, Artificial Sequence
  source: /note="Description of Artificial Sequence: Synthetic oligonucleotide"
aagaagaugagacacucuuucug

SEQ ID NO: 4458 - DNA, 21 bp, Artificial Sequence
  source: /note="Description of Artificial Sequence: Synthetic oligonucleotide"
  source: /note="Description of Combined DNA/RNA Molecule: Synthetic oligonucleotide"
gaaagagugucucauctucuu

SEQ ID NO: 4459 - RNA, 23 nt, Artificial Sequence
  source: /note="Description of Artificial Sequence: Synthetic oligonucleotide"
aagaagaugagacacucuuucug

SEQ ID NO: 4460 - RNA, 21 nt, Artificial Sequence
  source: /note="Description of Artificial Sequence: Synthetic oligonucleotide"
gaaagagugucucaucuucuu

SEQ ID NO: 4461 - RNA, 23 nt, Artificial Sequence
  source: /note="Description of Artificial Sequence: Synthetic oligonucleotide"
aagaagaugagacacucuuucug

SEQ ID NO: 4462 - RNA, 21 nt, Artificial Sequence
  source: /note="Description of Artificial Sequence: Synthetic oligonucleotide"
gaaagagugucucaucuucuu

SEQ ID NO: 4463 - RNA, 23 nt, Artificial Sequence
  source: /note="Description of Artificial Sequence: Synthetic oligonucleotide"
aagaagaugagacacucuuucug

SEQ ID NO: 4464 - RNA, 21 nt, Artificial Sequence
  source: /note="Description of Artificial Sequence: Synthetic oligonucleotide"
gaaagagugucucaucuucuu

SEQ ID NO: 4465 - RNA, 23 nt, Artificial Sequence
  source: /note="Description of Artificial Sequence: Synthetic oligonucleotide"
aagaagaugagacacucuuucug

SEQ ID NO: 4466 - DNA, 21 bp, Artificial Sequence
  source: /note="Description of Artificial Sequence: Synthetic oligonucleotide"
  source: /note="Description of Combined DNA/RNA Molecule: Synthetic oligonucleotide"
gaaagagugtcucaucuucuu

SEQ ID NO: 4467 - RNA, 23 nt, Artificial Sequence
  source: /note="Description of Artificial Sequence: Synthetic oligonucleotide"
aagaagaugagacacucuuucug

SEQ ID NO: 4468 - DNA, 21 bp, Artificial Sequence
  source: /note="Description of Artificial Sequence: Synthetic oligonucleotide"
  source: /note="Description of Combined DNA/RNA Molecule: Synthetic oligonucleotide"
gaaagagugucucauctucuu

SEQ ID NO: 4469 - RNA, 23 nt, Artificial Sequence
  source: /note="Description of Artificial Sequence: Synthetic oligonucleotide"
aagaagaugagacacucuuucug

SEQ ID NO: 4470 - DNA, 21 bp, Artificial Sequence
  source: /note="Description of Artificial Sequence: Synthetic oligonucleotide"
  source: /note="Description of Combined DNA/RNA Molecule: Synthetic oligonucleotide"
gaaagagugucucauctucuu

SEQ ID NO: 4471 - RNA, 23 nt, Artificial Sequence
  source: /note="Description of Artificial Sequence: Synthetic oligonucleotide"
aagaagaugagacacucuuucug

SEQ ID NO: 4472 - RNA, 21 nt, Artificial Sequence
  source: /note="Description of Artificial Sequence: Synthetic oligonucleotide"
gaaagagugucucaucuucuu

SEQ ID NO: 4473 - RNA, 23 nt, Artificial Sequence
  source: /note="Description of Artificial Sequence: Synthetic oligonucleotide"
aagaagaugagacacucuuucug

SEQ ID NO: 4474 - DNA, 21 bp, Artificial Sequence
  source: /note="Description of Artificial Sequence: Synthetic oligonucleotide"
  source: /note="Description of Combined DNA/RNA Molecule: Synthetic oligonucleotide"
gaaagagugtcucaucuucuu

SEQ ID NO: 4475 - RNA, 23 nt, Artificial Sequence
  source: /note="Description of Artificial Sequence: Synthetic oligonucleotide"
aagaagaugagacacucuuucug

SEQ ID NO: 4476 - RNA, 21 nt, Artificial Sequence
  source: /note="Description of Artificial Sequence: Synthetic oligonucleotide"
gaaagagugucucaucuucuu

SEQ ID NO: 4477 - DNA, 23 bp, Artificial Sequence
  source: /note="Description of Artificial Sequence: Synthetic oligonucleotide"
  source: /note="Description of Combined DNA/RNA Molecule: Synthetic oligonucleotide"
aagaagaugagacactcuuucug

SEQ ID NO: 4478 - DNA, 21 bp, Artificial Sequence
  source: /note="Description of Artificial Sequence: Synthetic oligonucleotide"
  source: /note="Description of Combined DNA/RNA Molecule: Synthetic oligonucleotide"
gaaagagugtcucaucuucuu

SEQ ID NO: 4479 - DNA, 23 bp, Artificial Sequence
  source: /note="Description of Artificial Sequence: Synthetic oligonucleotide"
  source: /note="Description of Combined DNA/RNA Molecule: Synthetic oligonucleotide"
aagaagaugagacactcuuucug

SEQ ID NO: 4480 - DNA, 21 bp, Artificial Sequence
  source: /note="Description of Artificial Sequence: Synthetic oligonucleotide"
  source: /note="Description of Combined DNA/RNA Molecule: Synthetic oligonucleotide"
gaaagagugtcucaucuucuu

SEQ ID NO: 4481 - DNA, 23 bp, Artificial Sequence
  source: /note="Description of Artificial Sequence: Synthetic oligonucleotide"
  source: /note="Description of Combined DNA/RNA Molecule: Synthetic oligonucleotide"
aagaagaugagacactcuuucug

SEQ ID NO: 4482 - DNA, 21 bp, Artificial Sequence
  source: /note="Description of Artificial Sequence: Synthetic oligonucleotide"
  source: /note="Description of Combined DNA/RNA Molecule: Synthetic oligonucleotide"
gaaagagugtcucaucuucuu

SEQ ID NO: 4483 - DNA, 23 bp, Artificial Sequence
  source: /note="Description of Artificial Sequence: Synthetic oligonucleotide"
  source: /note="Description of Combined DNA/RNA Molecule: Synthetic oligonucleotide"
aagaagaugagacactcuuucug

SEQ ID NO: 4484 - DNA, 21 bp, Artificial Sequence
  source: /note="Description of Artificial Sequence: Synthetic oligonucleotide"
  source: /note="Description of Combined DNA/RNA Molecule: Synthetic oligonucleotide"
gaaagagugucucauctucuu

SEQ ID NO: 4485 - RNA, 23 nt, Artificial Sequence
  source: /note="Description of Artificial Sequence: Synthetic oligonucleotide"
aagaagaugagacacucuuucug

SEQ ID NO: 4486 - DNA, 21 bp, Artificial Sequence
  source: /note="Description of Artificial Sequence: Synthetic oligonucleotide"
  source: /note="Description of Combined DNA/RNA Molecule: Synthetic oligonucleotide"
gaaagagugtcucauctucuu

SEQ ID NO: 4487 - RNA, 23 nt, Artificial Sequence
  source: /note="Description of Artificial Sequence: Synthetic oligonucleotide"
aagaagaugagacacucuuucug

SEQ ID NO: 4488 - DNA, 21 bp, Artificial Sequence
  source: /note="Description of Artificial Sequence: Synthetic oligonucleotide"
  source: /note="Description of Combined DNA/RNA Molecule: Synthetic oligonucleotide"
gaaagagugucucauctucuu

SEQ ID NO: 4489 - DNA, 23 bp, Artificial Sequence
  source: /note="Description of Artificial Sequence: Synthetic oligonucleotide"
  source: /note="Description of Combined DNA/RNA Molecule: Synthetic oligonucleotide"
aagaagaugagacactcuuucug

SEQ ID NO: 4490 - DNA, 21 bp, Artificial Sequence
  source: /note="Description of Artificial Sequence: Synthetic oligonucleotide"
  source: /note="Description of Combined DNA/RNA Molecule: Synthetic oligonucleotide"
gaaagagugtcucauctucuu

SEQ ID NO: 4491 - DNA, 23 bp, Artificial Sequence
  source: /note="Description of Artificial Sequence: Synthetic oligonucleotide"
  source: /note="Description of Combined DNA/RNA Molecule: Synthetic oligonucleotide"
aagaagaugagacactcuuucug

SEQ ID NO: 4492 - DNA, 21 bp, Artificial Sequence
  source: /note="Description of Artificial Sequence: Synthetic oligonucleotide"
  source: /note="Description of Combined DNA/RNA Molecule: Synthetic oligonucleotide"
gaaagagugtcucauctucuu

SEQ ID NO: 4493 - DNA, 23 bp, Artificial Sequence
  source: /note="Description of Artificial Sequence: Synthetic oligonucleotide"
  source: /note="Description of Combined DNA/RNA Molecule: Synthetic oligonucleotide"
aagaagaugagacactcuuucug

SEQ ID NO: 4494 - DNA, 21 bp, Artificial Sequence
  source: /note="Description of Artificial Sequence: Synthetic oligonucleotide"
  source: /note="Description of Combined DNA/RNA Molecule: Synthetic oligonucleotide"
gaaagagugtcucauctucuu

SEQ ID NO: 4495 - DNA, 23 bp, Artificial Sequence
  source: /note="Description of Artificial Sequence: Synthetic oligonucleotide"
  source: /note="Description of Combined DNA/RNA Molecule: Synthetic oligonucleotide"
aagaagaugagacactcuuucug

SEQ ID NO: 4496 - RNA, 21 nt, Artificial Sequence
  source: /note="Description of Artificial Sequence: Synthetic oligonucleotide"
gaaagagugucucaucuucuu

SEQ ID NO: 4497 - RNA, 23 nt, Artificial Sequence
  source: /note="Description of Artificial Sequence: Synthetic oligonucleotide"
aagaagaugagacacucuuucug

SEQ ID NO: 4498 - DNA, 21 bp, Artificial Sequence
  source: /note="Description of Artificial Sequence: Synthetic oligonucleotide"
  source: /note="Description of Combined DNA/RNA Molecule: Synthetic oligonucleotide"
gaaagagugtcucaucuucuu

SEQ ID NO: 4499 - RNA, 23 nt, Artificial Sequence
  source: /note="Description of Artificial Sequence: Synthetic oligonucleotide"
aagaagaugagacacucuuucug

SEQ ID NO: 4500 - RNA, 21 nt, Artificial Sequence
  source: /note="Description of Artificial Sequence: Synthetic oligonucleotide"
gaaagagugucucaucuucuu

SEQ ID NO: 4501 - DNA, 23 bp, Artificial Sequence
  source: /note="Description of Artificial Sequence: Synthetic oligonucleotide"
  source: /note="Description of Combined DNA/RNA Molecule: Synthetic oligonucleotide"
aagaagaugagacactcuuucug

SEQ ID NO: 4502 - DNA, 21 bp, Artificial Sequence
  source: /note="Description of Artificial Sequence: Synthetic oligonucleotide"
  source: /note="Description of Combined DNA/RNA Molecule: Synthetic oligonucleotide"
gaaagagugtcucaucuucuu

SEQ ID NO: 4503 - DNA, 23 bp, Artificial Sequence
  source: /note="Description of Artificial Sequence: Synthetic oligonucleotide"
  source: /note="Description of Combined DNA/RNA Molecule: Synthetic oligonucleotide"
aagaagaugagacactcuuucug

SEQ ID NO: 4504 - DNA, 21 bp, Artificial Sequence
  source: /note="Description of Artificial Sequence: Synthetic oligonucleotide"
  source: /note="Description of Combined DNA/RNA Molecule: Synthetic oligonucleotide"
gaaagagugtcucaucuucuu

SEQ ID NO: 4505 - DNA, 23 bp, Artificial Sequence
  source: /note="Description of Artificial Sequence: Synthetic oligonucleotide"
  source: /note="Description of Combined DNA/RNA Molecule: Synthetic oligonucleotide"
aagaagaugagacactcuuucug

SEQ ID NO: 4506 - DNA, 21 bp, Artificial Sequence
  source: /note="Description of Artificial Sequence: Synthetic oligonucleotide"
  source: /note="Description of Combined DNA/RNA Molecule: Synthetic oligonucleotide"
gaaagagugtcucaucuucuu

SEQ ID NO: 4507 - DNA, 23 bp, Artificial Sequence
  source: /note="Description of Artificial Sequence: Synthetic oligonucleotide"
  source: /note="Description of Combined DNA/RNA Molecule: Synthetic oligonucleotide"
aagaagaugagacactcuuucug

SEQ ID NO: 4508 - RNA, 21 nt, Artificial Sequence
  source: /note="Description of Artificial Sequence: Synthetic oligonucleotide"
gaaagagugucucaucuucuu

SEQ ID NO: 4509 - RNA, 23 nt, Artificial Sequence
  source: /note="Description of Artificial Sequence: Synthetic oligonucleotide"
aagaagaugagacacucuuucug

SEQ ID NO: 4510 - RNA, 21 nt, Artificial Sequence
  source: /note="Description of Artificial Sequence: Synthetic oligonucleotide"
gaaagagugucucaucuucuu

SEQ ID NO: 4511 - RNA, 23 nt, Artificial Sequence
  source: /note="Description of Artificial Sequence: Synthetic oligonucleotide"
aagaagaugagacacucuuucug

SEQ ID NO: 4512 - RNA, 21 nt, Artificial Sequence
  source: /note="Description of Artificial Sequence: Synthetic oligonucleotide"
gaaagagugucucaucuucuu

SEQ ID NO: 4513 - RNA, 23 nt, Artificial Sequence
  source: /note="Description of Artificial Sequence: Synthetic oligonucleotide"
aagaagaugagacacucuuucug

SEQ ID NO: 4514 - RNA, 21 nt, Artificial Sequence
  source: /note="Description of Artificial Sequence: Synthetic oligonucleotide"
gaaagagugucucaucuucuu

SEQ ID NO: 4515 - RNA, 23 nt, Artificial Sequence
  source: /note="Description of Artificial Sequence: Synthetic oligonucleotide"
aagaagaugagacacucuuucug

SEQ ID NO: 4516 - RNA, 21 nt, Artificial Sequence
  source: /note="Description of Artificial Sequence: Synthetic oligonucleotide"
gaaagagugucucaucuucuu

SEQ ID NO: 4517 - RNA, 23 nt, Artificial Sequence
  source: /note="Description of Artificial Sequence: Synthetic oligonucleotide"
aagaagaugagacacucuuucug

SEQ ID NO: 4518 - RNA, 21 nt, Artificial Sequence
  source: /note="Description of Artificial Sequence: Synthetic oligonucleotide"
gaaagagugucucaucuucuu

SEQ ID NO: 4519 - RNA, 23 nt, Artificial Sequence
  source: /note="Description of Artificial Sequence: Synthetic oligonucleotide"
aagaagaugagacacucuuucug

SEQ ID NO: 4520 - RNA, 21 nt, Artificial Sequence
  source: /note="Description of Artificial Sequence: Synthetic oligonucleotide"
gaaagagugucucaucuucuu

SEQ ID NO: 4521 - RNA, 23 nt, Artificial Sequence
  source: /note="Description of Artificial Sequence: Synthetic oligonucleotide"
aagaagaugagacacucuuucug

SEQ ID NO: 4522 - DNA, 21 bp, Artificial Sequence
  source: /note="Description of Artificial Sequence: Synthetic oligonucleotide"
  source: /note="Description of Combined DNA/RNA Molecule: Synthetic oligonucleotide"
gaaagagugtcucaucuucuu

SEQ ID NO: 4523 - RNA, 23 nt, Artificial Sequence
  source: /note="Description of Artificial Sequence: Synthetic oligonucleotide"
aagaagaugagacacucuuucug

SEQ ID NO: 4524 - DNA, 21 bp, Artificial Sequence
  source: /note="Description of Artificial Sequence: Synthetic oligonucleotide"
  source: /note="Description of Combined DNA/RNA Molecule: Synthetic oligonucleotide"
gaaagagugtcucaucuucuu

SEQ ID NO: 4525 - RNA, 23 nt, Artificial Sequence
  source: /note="Description of Artificial Sequence: Synthetic oligonucleotide"
aagaagaugagacacucuuucug

SEQ ID NO: 4526 - DNA, 21 bp, Artificial Sequence
  source: /note="Description of Artificial Sequence: Synthetic oligonucleotide"
  source: /note="Description of Combined DNA/RNA Molecule: Synthetic oligonucleotide"
gaaagagugtcucaucuucuu

SEQ ID NO: 4527 - RNA, 23 nt, Artificial Sequence
  source: /note="Description of Artificial Sequence: Synthetic oligonucleotide"
aagaagaugagacacucuuucug

SEQ ID NO: 4528 - DNA, 21 bp, Artificial Sequence
  source: /note="Description of Artificial Sequence: Synthetic oligonucleotide"
  source: /note="Description of Combined DNA/RNA Molecule: Synthetic oligonucleotide"
gaaagagugucucauctucuu

SEQ ID NO: 4529 - RNA, 23 nt, Artificial Sequence
  source: /note="Description of Artificial Sequence: Synthetic oligonucleotide"
aagaagaugagacacucuuucug

SEQ ID NO: 4530 - DNA, 21 bp, Artificial Sequence
  source: /note="Description of Artificial Sequence: Synthetic oligonucleotide"
  source: /note="Description of Combined DNA/RNA Molecule: Synthetic oligonucleotide"
gaaagagugucucauctucuu

SEQ ID NO: 4531 - RNA, 23 nt, Artificial Sequence
  source: /note="Description of Artificial Sequence: Synthetic oligonucleotide"
aagaagaugagacacucuuucug

SEQ ID NO: 4532 - DNA, 21 bp, Artificial Sequence
  source: /note="Description of Artificial Sequence: Synthetic oligonucleotide"
  source: /note="Description of Combined DNA/RNA Molecule: Synthetic oligonucleotide"
gaaagagugucucauctucuu

SEQ ID NO: 4533 - RNA, 23 nt, Artificial Sequence
  source: /note="Description of Artificial Sequence: Synthetic oligonucleotide"
aagaagaugagacacucuuucug

SEQ ID NO: 4534 - RNA, 21 nt, Artificial Sequence
  source: /note="Description of Artificial Sequence: Synthetic oligonucleotide"
gaaagagugucucaucuucuu

SEQ ID NO: 4535 - RNA, 23 nt, Artificial Sequence
  source: /note="Description of Artificial Sequence: Synthetic oligonucleotide"
aagaagaugagacacucuuucug

SEQ ID NO: 4536 - RNA, 21 nt, Artificial Sequence
  source: /note="Description of Artificial Sequence: Synthetic oligonucleotide"
gaaagagugucucaucuucuu

SEQ ID NO: 4537 - RNA, 23 nt, Artificial Sequence
  source: /note="Description of Artificial Sequence: Synthetic oligonucleotide"
aagaagaugagacacucuuucug

SEQ ID NO: 4538 - RNA, 21 nt, Artificial Sequence
  source: /note="Description of Artificial Sequence: Synthetic oligonucleotide"
gaaagagugucucaucuucuu

SEQ ID NO: 4539 - RNA, 23 nt, Artificial Sequence
  source: /note="Description of Artificial Sequence: Synthetic oligonucleotide"
aagaagaugagacacucuuucug

SEQ ID NO: 4540 - RNA, 21 nt, Artificial Sequence
  source: /note="Description of Artificial Sequence: Synthetic oligonucleotide"
gaaagagugucucaucuucuu

SEQ ID NO: 4541 - RNA, 23 nt, Artificial Sequence
  source: /note="Description of Artificial Sequence: Synthetic oligonucleotide"
aagaagaugagacacucuuucug

SEQ ID NO: 4542 - RNA, 21 nt, Artificial Sequence
  source: /note="Description of Artificial Sequence: Synthetic oligonucleotide"
gaaagagugucucaucuucuu

SEQ ID NO: 4543 - RNA, 23 nt, Artificial Sequence
  source: /note="Description of Artificial Sequence: Synthetic oligonucleotide"
aagaagaugagacacucuuucug

SEQ ID NO: 4544 - RNA, 21 nt, Artificial Sequence
  source: /note="Description of Artificial Sequence: Synthetic oligonucleotide"
gaaagagugucucaucuucuu

SEQ ID NO: 4545 - RNA, 23 nt, Artificial Sequence
  source: /note="Description of Artificial Sequence: Synthetic oligonucleotide"
aagaagaugagacacucuuucug

SEQ ID NO: 4546 - RNA, 21 nt, Artificial Sequence
  source: /note="Description of Artificial Sequence: Synthetic oligonucleotide"
gaaagagugucucaucuucuu

SEQ ID NO: 4547 - RNA, 23 nt, Artificial Sequence
  source: /note="Description of Artificial Sequence: Synthetic oligonucleotide"
aagaagaugagacacucuuucug

SEQ ID NO: 4548 - RNA, 21 nt, Artificial Sequence
  source: /note="Description of Artificial Sequence: Synthetic oligonucleotide"
gaaagagugucucaucuucuu

SEQ ID NO: 4549 - RNA, 23 nt, Artificial Sequence
  source: /note="Description of Artificial Sequence: Synthetic oligonucleotide"
aagaagaugagacacucuuucug

SEQ ID NO: 4550 - RNA, 21 nt, Artificial Sequence
  source: /note="Description of Artificial Sequence: Synthetic oligonucleotide"
gaaagagugucucaucuucuu

SEQ ID NO: 4551 - RNA, 23 nt, Artificial Sequence
  source: /note="Description of Artificial Sequence: Synthetic oligonucleotide"
aagaagaugagacacucuuucug

SEQ ID NO: 4552 - RNA, 21 nt, Artificial Sequence
  source: /note="Description of Artificial Sequence: Synthetic oligonucleotide"
gaaagagugucucaucuucuu

SEQ ID NO: 4553 - RNA, 23 nt, Artificial Sequence
  source: /note="Description of Artificial Sequence: Synthetic oligonucleotide"
aagaagaugagacacucuuucug

SEQ ID NO: 4554 - RNA, 21 nt, Artificial Sequence
  source: /note="Description of Artificial Sequence: Synthetic oligonucleotide"
gaaagagugucucaucuucuu

SEQ ID NO: 4555 - RNA, 23 nt, Artificial Sequence
  source: /note="Description of Artificial Sequence: Synthetic oligonucleotide"
aagaagaugagacacucuuucug

SEQ ID NO: 4556 - RNA, 21 nt, Artificial Sequence
  source: /note="Description of Artificial Sequence: Synthetic oligonucleotide"
gaaagagugucucaucuucuu

SEQ ID NO: 4557 - RNA, 23 nt, Artificial Sequence
  source: /note="Description of Artificial Sequence: Synthetic oligonucleotide"
aagaagaugagacacucuuucug

SEQ ID NO: 4558 - RNA, 21 nt, Artificial Sequence
  source: /note="Description of Artificial Sequence: Synthetic oligonucleotide"
gaaagagugucucaucuucuu

SEQ ID NO: 4559 - RNA, 23 nt, Artificial Sequence
  source: /note="Description of Artificial Sequence: Synthetic oligonucleotide"
aagaagaugagacacucuuucug

SEQ ID NO: 4560 - RNA, 21 nt, Artificial Sequence
  source: /note="Description of Artificial Sequence: Synthetic oligonucleotide"
gaaagagugucucaucuucuu

SEQ ID NO: 4561 - RNA, 23 nt, Artificial Sequence
  source: /note="Description of Artificial Sequence: Synthetic oligonucleotide"
aagaagaugagacacucuuucug

SEQ ID NO: 4562 - RNA, 21 nt, Artificial Sequence
  source: /note="Description of Artificial Sequence: Synthetic oligonucleotide"
gaaagagugucucaucuucuu

SEQ ID NO: 4563 - RNA, 23 nt, Artificial Sequence
  source: /note="Description of Artificial Sequence: Synthetic oligonucleotide"
aagaagaugagacacucuuucug

SEQ ID NO: 4564 - DNA, 21 bp, Artificial Sequence
  source: /note="Description of Artificial Sequence: Synthetic oligonucleotide"
  source: /note="Description of Combined DNA/RNA Molecule: Synthetic oligonucleotide"
gaaagagugtcucaucuucuu

SEQ ID NO: 4565 - RNA, 23 nt, Artificial Sequence
  source: /note="Description of Artificial Sequence: Synthetic oligonucleotide"
aagaagaugagacacucuuucug

SEQ ID NO: 4566 - DNA, 21 bp, Artificial Sequence
  source: /note="Description of Artificial Sequence: Synthetic oligonucleotide"
  source: /note="Description of Combined DNA/RNA Molecule: Synthetic oligonucleotide"
gaaagagugtcucaucuucuu

SEQ ID NO: 4567 - RNA, 23 nt, Artificial Sequence
  source: /note="Description of Artificial Sequence: Synthetic oligonucleotide"
aagaagaugagacacucuuucug

SEQ ID NO: 4568 - DNA, 21 bp, Artificial Sequence
  source: /note="Description of Artificial Sequence: Synthetic oligonucleotide"
  source: /note="Description of Combined DNA/RNA Molecule: Synthetic oligonucleotide"
gaaagagugtcucaucuucuu

SEQ ID NO: 4569 - RNA, 23 nt, Artificial Sequence
  source: /note="Description of Artificial Sequence: Synthetic oligonucleotide"
aagaagaugagacacucuuucug

SEQ ID NO: 4570 - DNA, 21 bp, Artificial Sequence
  source: /note="Description of Artificial Sequence: Synthetic oligonucleotide"
  source: /note="Description of Combined DNA/RNA Molecule: Synthetic oligonucleotide"
gaaagagugtcucaucuucuu

SEQ ID NO: 4571 - RNA, 23 nt, Artificial Sequence
  source: /note="Description of Artificial Sequence: Synthetic oligonucleotide"
aagaagaugagacacucuuucug

SEQ ID NO: 4572 - DNA, 21 bp, Artificial Sequence
  source: /note="Description of Artificial Sequence: Synthetic oligonucleotide"
  source: /note="Description of Combined DNA/RNA Molecule: Synthetic oligonucleotide"
gaaagagugtcucaucuucuu

SEQ ID NO: 4573 - RNA, 23 nt, Artificial Sequence
  source: /note="Description of Artificial Sequence: Synthetic oligonucleotide"
aagaagaugagacacucuuucug

SEQ ID NO: 4574 - DNA, 21 bp, Artificial Sequence
  source: /note="Description of Artificial Sequence: Synthetic oligonucleotide"
  source: /note="Description of Combined DNA/RNA Molecule: Synthetic oligonucleotide"
gaaagagugucucauctucuu

SEQ ID NO: 4575 - RNA, 23 nt, Artificial Sequence
  source: /note="Description of Artificial Sequence: Synthetic oligonucleotide"
aagaagaugagacacucuuucug

SEQ ID NO: 4576 - DNA, 21 bp, Artificial Sequence
  source: /note="Description of Artificial Sequence: Synthetic oligonucleotide"
  source: /note="Description of Combined DNA/RNA Molecule: Synthetic oligonucleotide"
gaaagagugucucauctucuu

SEQ ID NO: 4577 - RNA, 23 nt, Artificial Sequence
  source: /note="Description of Artificial Sequence: Synthetic oligonucleotide"
aagaagaugagacacucuuucug

SEQ ID NO: 4578 - DNA, 21 bp, Artificial Sequence
  source: /note="Description of Artificial Sequence: Synthetic oligonucleotide"
  source: /note="Description of Combined DNA/RNA Molecule: Synthetic oligonucleotide"
gaaagagugucucauctucuu

SEQ ID NO: 4579 - RNA, 23 nt, Artificial Sequence
  source: /note="Description of Artificial Sequence: Synthetic oligonucleotide"
aagaagaugagacacucuuucug

SEQ ID NO: 4580 - DNA, 21 bp, Artificial Sequence
  source: /note="Description of Artificial Sequence: Synthetic oligonucleotide"
  source: /note="Description of Combined DNA/RNA Molecule: Synthetic oligonucleotide"
gaaagagugucucauctucuu

SEQ ID NO: 4581 - RNA, 23 nt, Artificial Sequence
  source: /note="Description of Artificial Sequence: Synthetic oligonucleotide"
aagaagaugagacacucuuucug

SEQ ID NO: 4582 - DNA, 21 bp, Artificial Sequence
  source: /note="Description of Artificial Sequence: Synthetic oligonucleotide"
  source: /note="Description of Combined DNA/RNA Molecule: Synthetic oligonucleotide"
gaaagagugucucauctucuu

SEQ ID NO: 4583 - RNA, 23 nt, Artificial Sequence
  source: /note="Description of Artificial Sequence: Synthetic oligonucleotide"
aagaagaugagacacucuuucug

SEQ ID NO: 4584 - RNA, 21 nt, Artificial Sequence
  source: /note="Description of Artificial Sequence: Synthetic oligonucleotide"
gaaagagugucucaucuucuu

SEQ ID NO: 4585 - RNA, 23 nt, Artificial Sequence
  source: /note="Description of Artificial Sequence: Synthetic oligonucleotide"
aagaagaugagacacucuuucug

SEQ ID NO: 4586 - RNA, 21 nt, Artificial Sequence
  source: /note="Description of Artificial Sequence: Synthetic oligonucleotide"
gaaagagugucucaucuucuu

SEQ ID NO: 4587 - RNA, 23 nt, Artificial Sequence
  source: /note="Description of Artificial Sequence: Synthetic oligonucleotide"
aagaagaugagacacucuuucug

SEQ ID NO: 4588 - RNA, 21 nt, Artificial Sequence
  source: /note="Description of Artificial Sequence: Synthetic oligonucleotide"
gaaagagugucucaucuucuu

SEQ ID NO: 4589 - RNA, 23 nt, Artificial Sequence
  source: /note="Description of Artificial Sequence: Synthetic oligonucleotide"
aagaagaugagacacucuuucug

SEQ ID NO: 4590 - DNA, 21 bp, Artificial Sequence
  source: /note="Description of Artificial Sequence: Synthetic oligonucleotide"
  source: /note="Description of Combined DNA/RNA Molecule: Synthetic oligonucleotide"
gaaagagugtcucaucuucuu

SEQ ID NO: 4591 - RNA, 23 nt, Artificial Sequence
  source: /note="Description of Artificial Sequence: Synthetic oligonucleotide"
aagaagaugagacacucuuucug

SEQ ID NO: 4592 - DNA, 21 bp, Artificial Sequence
  source: /note="Description of Artificial Sequence: Synthetic oligonucleotide"
  source: /note="Description of Combined DNA/RNA Molecule: Synthetic oligonucleotide"
gaaagagugucucauctucuu

SEQ ID NO: 4593 - RNA, 23 nt, Artificial Sequence
  source: /note="Description of Artificial Sequence: Synthetic oligonucleotide"
aagaagaugagacacucuuucug

SEQ ID NO: 4594 - DNA, 21 bp, Artificial Sequence
  source: /note="Description of Artificial Sequence: Synthetic oligonucleotide"
  source: /note="Description of Combined DNA/RNA Molecule: Synthetic oligonucleotide"
gaaagagugucucauctucuu

SEQ ID NO: 4595 - RNA, 23 nt, Artificial Sequence
  source: /note="Description of Artificial Sequence: Synthetic oligonucleotide"
aagaagaugagacacucuuucug

SEQ ID NO: 4596 - RNA, 21 nt, Artificial Sequence
  source: /note="Description of Artificial Sequence: Synthetic oligonucleotide"
gaaagagugucucaucuucuu

SEQ ID NO: 4597 - RNA, 23 nt, Artificial Sequence
  source: /note="Description of Artificial Sequence: Synthetic oligonucleotide"
aagaagaugagacacucuuucug

SEQ ID NO: 4598 - RNA, 21 nt, Artificial Sequence
  source: /note="Description of Artificial Sequence: Synthetic oligonucleotide"
gaaagagugucucaucuucuu

SEQ ID NO: 4599 - RNA, 23 nt, Artificial Sequence
  source: /note="Description of Artificial Sequence: Synthetic oligonucleotide"
aagaagaugagacacucuuucug

SEQ ID NO: 4600 - RNA, 21 nt, Artificial Sequence
  source: /note="Description of Artificial Sequence: Synthetic oligonucleotide"
gaaagagugucucaucuucuu

SEQ ID NO: 4601 - RNA, 23 nt, Artificial Sequence
  source: /note="Description of Artificial Sequence: Synthetic oligonucleotide"
aagaagaugagacacucuuucug

SEQ ID NO: 4602 - DNA, 21 bp, Artificial Sequence
  source: /note="Description of Artificial Sequence: Synthetic oligonucleotide"
  source: /note="Description of Combined DNA/RNA Molecule: Synthetic oligonucleotide"
gaaagagugtcucaucuucuu

SEQ ID NO: 4603 - RNA, 23 nt, Artificial Sequence
  source: /note="Description of Artificial Sequence: Synthetic oligonucleotide"
aagaagaugagacacucuuucug

SEQ ID NO: 4604 - DNA, 21 bp, Artificial Sequence
  source: /note="Description of Artificial Sequence: Synthetic oligonucleotide"
  source: /note="Description of Combined DNA/RNA Molecule: Synthetic oligonucleotide"
gaaagagugucucauctucuu

SEQ ID NO: 4605 - RNA, 23 nt, Artificial Sequence
  source: /note="Description of Artificial Sequence: Synthetic oligonucleotide"
aagaagaugagacacucuuucug

SEQ ID NO: 4606 - DNA, 21 bp, Artificial Sequence
  source: /note="Description of Artificial Sequence: Synthetic oligonucleotide"
  source: /note="Description of Combined DNA/RNA Molecule: Synthetic oligonucleotide"
gaaagagugucucauctucuu

SEQ ID NO: 4607 - RNA, 23 nt, Artificial Sequence
  source: /note="Description of Artificial Sequence: Synthetic oligonucleotide"
aagaagaugagacacucuuucug

SEQ ID NO: 4608 - RNA, 21 nt, Artificial Sequence
  source: /note="Description of Artificial Sequence: Synthetic oligonucleotide"
gaaagagugucucaucuucuu

SEQ ID NO: 4609 - RNA, 23 nt, Artificial Sequence
  source: /note="Description of Artificial Sequence: Synthetic oligonucleotide"
aagaagaugagacacucuuucug

SEQ ID NO: 4610 - DNA, 21 bp, Artificial Sequence
  source: /note="Description of Artificial Sequence: Synthetic oligonucleotide"
  source: /note="Description of Combined DNA/RNA Molecule: Synthetic oligonucleotide"
gaaagagugtcucaucuucuu

SEQ ID NO: 4611 - RNA, 23 nt, Artificial Sequence
  source: /note="Description of Artificial Sequence: Synthetic oligonucleotide"
aagaagaugagacacucuuucug

SEQ ID NO: 4612 - RNA, 21 nt, Artificial Sequence
  source: /note="Description of Artificial Sequence: Synthetic oligonucleotide"
gaaagagugucucaucuucuu

SEQ ID NO: 4613 - DNA, 23 bp, Artificial Sequence
  source: /note="Description of Artificial Sequence: Synthetic oligonucleotide"
  source: /note="Description of Combined DNA/RNA Molecule: Synthetic oligonucleotide"
aagaagaugagacactcuuucug

SEQ ID NO: 4614 - DNA, 21 bp, Artificial Sequence
  source: /note="Description of Artificial Sequence: Synthetic oligonucleotide"
  source: /note="Description of Combined DNA/RNA Molecule: Synthetic oligonucleotide"
gaaagagugtcucaucuucuu

SEQ ID NO: 4615 - DNA, 23 bp, Artificial Sequence
  source: /note="Description of Artificial Sequence: Synthetic oligonucleotide"
  source: /note="Description of Combined DNA/RNA Molecule: Synthetic oligonucleotide"
aagaagaugagacactcuuucug

SEQ ID NO: 4616 - DNA, 21 bp, Artificial Sequence
  source: /note="Description of Artificial Sequence: Synthetic oligonucleotide"
  source: /note="Description of Combined DNA/RNA Molecule: Synthetic oligonucleotide"
gaaagagugtcucaucuucuu

SEQ ID NO: 4617 - DNA, 23 bp, Artificial Sequence
  source: /note="Description of Artificial Sequence: Synthetic oligonucleotide"
  source: /note="Description of Combined DNA/RNA Molecule: Synthetic oligonucleotide"
aagaagaugagacactcuuucug

SEQ ID NO: 4618 - DNA, 21 bp, Artificial Sequence
  source: /note="Description of Artificial Sequence: Synthetic oligonucleotide"
  source: /note="Description of Combined DNA/RNA Molecule: Synthetic oligonucleotide"
gaaagagugtcucaucuucuu

SEQ ID NO: 4619 - DNA, 23 bp, Artificial Sequence
  source: /note="Description of Artificial Sequence: Synthetic oligonucleotide"
  source: /note="Description of Combined DNA/RNA Molecule: Synthetic oligonucleotide"
aagaagaugagacactcuuucug

SEQ ID NO: 4620 - DNA, 21 bp, Artificial Sequence
  source: /note="Description of Artificial Sequence: Synthetic oligonucleotide"
  source: /note="Description of Combined DNA/RNA Molecule: Synthetic oligonucleotide"
gaaagagugucucauctucuu

SEQ ID NO: 4621 - RNA, 23 nt, Artificial Sequence
  source: /note="Description of Artificial Sequence: Synthetic oligonucleotide"
aagaagaugagacacucuuucug

SEQ ID NO: 4622 - DNA, 21 bp, Artificial Sequence
  source: /note="Description of Artificial Sequence: Synthetic oligonucleotide"
  source: /note="Description of Combined DNA/RNA Molecule: Synthetic oligonucleotide"
gaaagagugtcucauctucuu

SEQ ID NO: 4623 - RNA, 23 nt, Artificial Sequence
  source: /note="Description of Artificial Sequence: Synthetic oligonucleotide"
aagaagaugagacacucuuucug

SEQ ID NO: 4624 - DNA, 21 bp, Artificial Sequence
  source: /note="Description of Artificial Sequence: Synthetic oligonucleotide"
  source: /note="Description of Combined DNA/RNA Molecule: Synthetic oligonucleotide"
gaaagagugucucauctucuu

SEQ ID NO: 4625 - DNA, 23 bp, Artificial Sequence
  source: /note="Description of Artificial Sequence: Synthetic oligonucleotide"
  source: /note="Description of Combined DNA/RNA Molecule: Synthetic oligonucleotide"
aagaagaugagacactcuuucug

SEQ ID NO: 4626 - DNA, 21 bp, Artificial Sequence
  source: /note="Description of Artificial Sequence: Synthetic oligonucleotide"
  source: /note="Description of Combined DNA/RNA Molecule: Synthetic oligonucleotide"
gaaagagugtcucauctucuu

SEQ ID NO: 4627 - DNA, 23 bp, Artificial Sequence
  source: /note="Description of Artificial Sequence: Synthetic oligonucleotide"
  source: /note="Description of Combined DNA/RNA Molecule: Synthetic oligonucleotide"
aagaagaugagacactcuuucug

SEQ ID NO: 4628 - DNA, 21 bp, Artificial Sequence
  source: /note="Description of Artificial Sequence: Synthetic oligonucleotide"
  source: /note="Description of Combined DNA/RNA Molecule: Synthetic oligonucleotide"
gaaagagugtcucauctucuu

SEQ ID NO: 4629 - DNA, 23 bp, Artificial Sequence
  source: /note="Description of Artificial Sequence: Synthetic oligonucleotide"
  source: /note="Description of Combined DNA/RNA Molecule: Synthetic oligonucleotide"
aagaagaugagacactcuuucug

SEQ ID NO: 4630 - DNA, 21 bp, Artificial Sequence
  source: /note="Description of Artificial Sequence: Synthetic oligonucleotide"
  source: /note="Description of Combined DNA/RNA Molecule: Synthetic oligonucleotide"
gaaagagugtcucauctucuu

SEQ ID NO: 4631 - DNA, 23 bp, Artificial Sequence
  source: /note="Description of Artificial Sequence: Synthetic oligonucleotide"
  source: /note="Description of Combined DNA/RNA Molecule: Synthetic oligonucleotide"
aagaagaugagacactcuuucug

SEQ ID NO: 4632 - RNA, 21 nt, Artificial Sequence
  source: /note="Description of Artificial Sequence: Synthetic oligonucleotide"
gaaagagugucucaucuucuu

SEQ ID NO: 4633 - RNA, 23 nt, Artificial Sequence
  source: /note="Description of Artificial Sequence: Synthetic oligonucleotide"
aagaagaugagacacucuuucug

SEQ ID NO: 4634 - DNA, 21 bp, Artificial Sequence
  source: /note="Description of Artificial Sequence: Synthetic oligonucleotide"
  source: /note="Description of Combined DNA/RNA Molecule: Synthetic oligonucleotide"
gaaagagugtcucaucuucuu

SEQ ID NO: 4635 - RNA, 23 nt, Artificial Sequence
  source: /note="Description of Artificial Sequence: Synthetic oligonucleotide"
aagaagaugagacacucuuucug

SEQ ID NO: 4636 - RNA, 21 nt, Artificial Sequence
  source: /note="Description of Artificial Sequence: Synthetic oligonucleotide"
gaaagagugucucaucuucuu

SEQ ID NO: 4637 - DNA, 23 bp, Artificial Sequence
  source: /note="Description of Artificial Sequence: Synthetic oligonucleotide"
  source: /note="Description of Combined DNA/RNA Molecule: Synthetic oligonucleotide"
aagaagaugagacactcuuucug

SEQ ID NO: 4638 - DNA, 21 bp, Artificial Sequence
  source: /note="Description of Artificial Sequence: Synthetic oligonucleotide"
  source: /note="Description of Combined DNA/RNA Molecule: Synthetic oligonucleotide"
gaaagagugtcucaucuucuu

SEQ ID NO: 4639 - DNA, 23 bp, Artificial Sequence
  source: /note="Description of Artificial Sequence: Synthetic oligonucleotide"
  source: /note="Description of Combined DNA/RNA Molecule: Synthetic oligonucleotide"
aagaagaugagacactcuuucug

SEQ ID NO: 4640 - DNA, 21 bp, Artificial Sequence
  source: /note="Description of Artificial Sequence: Synthetic oligonucleotide"
  source: /note="Description of Combined DNA/RNA Molecule: Synthetic oligonucleotide"
gaaagagugtcucaucuucuu

SEQ ID NO: 4641 - DNA, 23 bp, Artificial Sequence
  source: /note="Description of Artificial Sequence: Synthetic oligonucleotide"
  source: /note="Description of Combined DNA/RNA Molecule: Synthetic oligonucleotide"
aagaagaugagacactcuuucug

SEQ ID NO: 4642 - DNA, 21 bp, Artificial Sequence
  source: /note="Description of Artificial Sequence: Synthetic oligonucleotide"
  source: /note="Description of Combined DNA/RNA Molecule: Synthetic oligonucleotide"
gaaagagugtcucaucuucuu

SEQ ID NO: 4643 - DNA, 23 bp, Artificial Sequence
  source: /note="Description of Artificial Sequence: Synthetic oligonucleotide"
  source: /note="Description of Combined DNA/RNA Molecule: Synthetic oligonucleotide"
aagaagaugagacactcuuucug

SEQ ID NO: 4644 - RNA, 21 nt, Artificial Sequence
  source: /note="Description of Artificial Sequence: Synthetic oligonucleotide"
gaaagagugucucaucuucuu

SEQ ID NO: 4645 - RNA, 23 nt, Artificial Sequence
  source: /note="Description of Artificial Sequence: Synthetic oligonucleotide"
aagaagaugagacacucuuucug

SEQ ID NO: 4646 - RNA, 21 nt, Artificial Sequence
  source: /note="Description of Artificial Sequence: Synthetic oligonucleotide"
gaaagagugucucaucuucuu

SEQ ID NO: 4647 - RNA, 23 nt, Artificial Sequence
  source: /note="Description of Artificial Sequence: Synthetic oligonucleotide"
aagaagaugagacacucuuucug

SEQ ID NO: 4648 - RNA, 21 nt, Artificial Sequence
  source: /note="Description of Artificial Sequence: Synthetic oligonucleotide"
gaaagagugucucaucuucuu

SEQ ID NO: 4649 - RNA, 23 nt, Artificial Sequence
  source: /note="Description of Artificial Sequence: Synthetic oligonucleotide"
aagaagaugagacacucuuucug

SEQ ID NO: 4650 - RNA, 21 nt, Artificial Sequence
  source: /note="Description of Artificial Sequence: Synthetic oligonucleotide"
gaaagagugucucaucuucuu

SEQ ID NO: 4651 - RNA, 23 nt, Artificial Sequence
  source: /note="Description of Artificial Sequence: Synthetic oligonucleotide"
aagaagaugagacacucuuucug

SEQ ID NO: 4652 - RNA, 21 nt, Artificial Sequence
  source: /note="Description of Artificial Sequence: Synthetic oligonucleotide"
gaaagagugucucaucuucuu

SEQ ID NO: 4653 - RNA, 23 nt, Artificial Sequence
  source: /note="Description of Artificial Sequence: Synthetic oligonucleotide"
aagaagaugagacacucuuucug

SEQ ID NO: 4654 - RNA, 21 nt, Artificial Sequence
  source: /note="Description of Artificial Sequence: Synthetic oligonucleotide"
gaaagagugucucaucuucuu

SEQ ID NO: 4655 - RNA, 23 nt, Artificial Sequence
  source: /note="Description of Artificial Sequence: Synthetic oligonucleotide"
aagaagaugagacacucuuucug

SEQ ID NO: 4656 - DNA, 21 bp, Artificial Sequence
  source: /note="Description of Artificial Sequence: Synthetic oligonucleotide"
  source: /note="Description of Combined DNA/RNA Molecule: Synthetic oligonucleotide"
gaaagagugtcucaucuucuu

SEQ ID NO: 4657 - RNA, 23 nt, Artificial Sequence
  source: /note="Description of Artificial Sequence: Synthetic oligonucleotide"
aagaagaugagacacucuuucug

SEQ ID NO: 4658 - DNA, 21 bp, Artificial Sequence
  source: /note="Description of Artificial Sequence: Synthetic oligonucleotide"
  source: /note="Description of Combined DNA/RNA Molecule: Synthetic oligonucleotide"
gaaagagugtcucaucuucuu

SEQ ID NO: 4659 - RNA, 23 nt, Artificial Sequence
  source: /note="Description of Artificial Sequence: Synthetic oligonucleotide"
aagaagaugagacacucuuucug

SEQ ID NO: 4660 - DNA, 21 bp, Artificial Sequence
  source: /note="Description of Artificial Sequence: Synthetic oligonucleotide"
  source: /note="Description of Combined DNA/RNA Molecule: Synthetic oligonucleotide"
gaaagagugucucauctucuu

SEQ ID NO: 4661 - RNA, 23 nt, Artificial Sequence
  source: /note="Description of Artificial Sequence: Synthetic oligonucleotide"
aagaagaugagacacucuuucug

SEQ ID NO: 4662 - DNA, 21 bp, Artificial Sequence
  source: /note="Description of Artificial Sequence: Synthetic oligonucleotide"
  source: /note="Description of Combined DNA/RNA Molecule: Synthetic oligonucleotide"
gaaagagugucucauctucuu

SEQ ID NO: 4663 - RNA, 23 nt, Artificial Sequence
  source: /note="Description of Artificial Sequence: Synthetic oligonucleotide"
aagaagaugagacacucuuucug

SEQ ID NO: 4664 - RNA, 21 nt, Artificial Sequence
  source: /note="Description of Artificial Sequence: Synthetic oligonucleotide"
gaaagagugucucaucuucuu

SEQ ID NO: 4665 - RNA, 23 nt, Artificial Sequence
  source: /note="Description of Artificial Sequence: Synthetic oligonucleotide"
aagaagaugagacacucuuucug

SEQ ID NO: 4666 - RNA, 21 nt, Artificial Sequence
  source: /note="Description of Artificial Sequence: Synthetic oligonucleotide"
gaaagagugucucaucuucuu

SEQ ID NO: 4667 - RNA, 23 nt, Artificial Sequence
  source: /note="Description of Artificial Sequence: Synthetic oligonucleotide"
aagaagaugagacacucuuucug

SEQ ID NO: 4668 - DNA, 21 bp, Artificial Sequence
  source: /note="Description of Artificial Sequence: Synthetic oligonucleotide"
  source: /note="Description of Combined DNA/RNA Molecule: Synthetic oligonucleotide"
gaaagagugucucauctucuu

SEQ ID NO: 4669 - RNA, 23 nt, Artificial Sequence
  source: /note="Description of Artificial Sequence: Synthetic oligonucleotide"
aagaagaugagacacucuuucug

SEQ ID NO: 4670 - DNA, 21 bp, Artificial Sequence
  source: /note="Description of Artificial Sequence: Synthetic oligonucleotide"
  source: /note="Description of Combined DNA/RNA Molecule: Synthetic oligonucleotide"
gaaagagugucucauctucuu

SEQ ID NO: 4671 - RNA, 23 nt, Artificial Sequence
  source: /note="Description of Artificial Sequence: Synthetic oligonucleotide"
aagaagaugagacacucuuucug

SEQ ID NO: 4672 - DNA, 21 bp, Artificial Sequence
  source: /note="Description of Artificial Sequence: Synthetic oligonucleotide"
  source: /note="Description of Combined DNA/RNA Molecule: Synthetic oligonucleotide"
gaaagagugucucauctucuu

SEQ ID NO: 4673 - RNA, 23 nt, Artificial Sequence
  source: /note="Description of Artificial Sequence: Synthetic oligonucleotide"
aagaagaugagacacucuuucug

SEQ ID NO: 4674 - DNA, 21 bp, Artificial Sequence
  source: /note="Description of Artificial Sequence: Synthetic oligonucleotide"
  source: /note="Description of Combined DNA/RNA Molecule: Synthetic oligonucleotide"
gaaagagugtcucaucuucuu

SEQ ID NO: 4675 - RNA, 23 nt, Artificial Sequence
  source: /note="Description of Artificial Sequence: Synthetic oligonucleotide"
aagaagaugagacacucuuucug

SEQ ID NO: 4676 - DNA, 21 bp, Artificial Sequence
  source: /note="Description of Artificial Sequence: Synthetic oligonucleotide"
  source: /note="Description of Combined DNA/RNA Molecule: Synthetic oligonucleotide"
gaaagagugtcucaucuucuu

SEQ ID NO: 4677 - RNA, 23 nt, Artificial Sequence
  source: /note="Description of Artificial Sequence: Synthetic oligonucleotide"
aagaagaugagacacucuuucug

SEQ ID NO: 4678 - DNA, 21 bp, Artificial Sequence
  source: /note="Description of Artificial Sequence: Synthetic oligonucleotide"
  source: /note="Description of Combined DNA/RNA Molecule: Synthetic oligonucleotide"
gaaagagugtcucaucuucuu

SEQ ID NO: 4679 - RNA, 23 nt, Artificial Sequence
  source: /note="Description of Artificial Sequence: Synthetic oligonucleotide"
aagaagaugagacacucuuucug

SEQ ID NO: 4680 - RNA, 21 nt, Artificial Sequence
  source: /note="Description of Artificial Sequence: Synthetic oligonucleotide"
gaaagagugucucaucuucuu

SEQ ID NO: 4681 - RNA, 23 nt, Artificial Sequence
  source: /note="Description of Artificial Sequence: Synthetic oligonucleotide"
aagaagaugagacacucuuucug

SEQ ID NO: 4682 - RNA, 21 nt, Artificial Sequence
  source: /note="Description of Artificial Sequence: Synthetic oligonucleotide"
gaaagagugucucaucuucuu

SEQ ID NO: 4683 - RNA, 23 nt, Artificial Sequence
  source: /note="Description of Artificial Sequence: Synthetic oligonucleotide"
aagaagaugagacacucuuucug

SEQ ID NO: 4684 - RNA, 21 nt, Artificial Sequence
  source: /note="Description of Artificial Sequence: Synthetic oligonucleotide"
gaaagagugucucaucuucuu

SEQ ID NO: 4685 - RNA, 23 nt, Artificial Sequence
  source: /note="Description of Artificial Sequence: Synthetic oligonucleotide"
aagaagaugagacacucuuucug

SEQ ID NO: 4686 - DNA, 21 bp, Artificial Sequence
  source: /note="Description of Artificial Sequence: Synthetic oligonucleotide"
  source: /note="Description of Combined DNA/RNA Molecule: Synthetic oligonucleotide"
gaaagagugtcucauctucuu

SEQ ID NO: 4687 - RNA, 23 nt, Artificial Sequence
  source: /note="Description of Artificial Sequence: Synthetic oligonucleotide"
aagaagaugagacacucuuucug

SEQ ID NO: 4688 - RNA, 21 nt, Artificial Sequence
  source: /note="Description of Artificial Sequence: Synthetic oligonucleotide"
gaaagagugucucaucuucuu

SEQ ID NO: 4689 - RNA, 23 nt, Artificial Sequence
  source: /note="Description of Artificial Sequence: Synthetic oligonucleotide"
aagaagaugagacacucuuucug

SEQ ID NO: 4690 - DNA, 21 bp, Artificial Sequence
  source: /note="Description of Artificial Sequence: Synthetic oligonucleotide"
  source: /note="Description of Combined DNA/RNA Molecule: Synthetic oligonucleotide"
gaaagagugtcucauctucuu

SEQ ID NO: 4691 - RNA, 23 nt, Artificial Sequence
  source: /note="Description of Artificial Sequence: Synthetic oligonucleotide"
aagaagaugagacacucuuucug

SEQ ID NO: 4692 - DNA, 21 bp, Artificial Sequence
  source: /note="Description of Artificial Sequence: Synthetic oligonucleotide"
  source: /note="Description of Combined DNA/RNA Molecule: Synthetic oligonucleotide"
gaaagagugtcucauctucuu

SEQ ID NO: 4693 - RNA, 23 nt, Artificial Sequence
  source: /note="Description of Artificial Sequence: Synthetic oligonucleotide"
aagaagaugagacacucuuucug

SEQ ID NO: 4694 - RNA, 21 nt, Artificial Sequence
  source: /note="Description of Artificial Sequence: Synthetic oligonucleotide"
gaaagagugucucaucuucuu

SEQ ID NO: 4695 - RNA, 23 nt, Artificial Sequence
  source: /note="Description of Artificial Sequence: Synthetic oligonucleotide"
aagaagaugagacacucuuucug

SEQ ID NO: 4696 - RNA, 21 nt, Artificial Sequence
  source: /note="Description of Artificial Sequence: Synthetic oligonucleotide"
gaaagagugucucaucuucuu

SEQ ID NO: 4697 - RNA, 23 nt, Artificial Sequence
  source: /note="Description of Artificial Sequence: Synthetic oligonucleotide"
aagaagaugagacacucuuucug

SEQ ID NO: 4698 - RNA, 21 nt, Artificial Sequence
  source: /note="Description of Artificial Sequence: Synthetic oligonucleotide"
gaaagagugucucaucuucuu

SEQ ID NO: 4699 - RNA, 23 nt, Artificial Sequence
  source: /note="Description of Artificial Sequence: Synthetic oligonucleotide"
aagaagaugagacacucuuucug

SEQ ID NO: 4700 - DNA, 21 bp, Artificial Sequence
  source: /note="Description of Artificial Sequence: Synthetic oligonucleotide"
  source: /note="Description of Combined DNA/RNA Molecule: Synthetic oligonucleotide"
gaaagagugtcucaucuucuu

SEQ ID NO: 4701 - RNA, 23 nt, Artificial Sequence
  source: /note="Description of Artificial Sequence: Synthetic oligonucleotide"
aagaagaugagacacucuuucug

SEQ ID NO: 4702 - DNA, 21 bp, Artificial Sequence
  source: /note="Description of Artificial Sequence: Synthetic oligonucleotide"
  source: /note="Description of Combined DNA/RNA Molecule: Synthetic oligonucleotide"
gaaagagugtcucaucuucuu

SEQ ID NO: 4703 - RNA, 23 nt, Artificial Sequence
  source: /note="Description of Artificial Sequence: Synthetic oligonucleotide"
aagaagaugagacacucuuucug

SEQ ID NO: 4704 - DNA, 21 bp, Artificial Sequence
  source: /note="Description of Artificial Sequence: Synthetic oligonucleotide"
  source: /note="Description of Combined DNA/RNA Molecule: Synthetic oligonucleotide"
gaaagagugtcucaucuucuu

SEQ ID NO: 4705 - RNA, 23 nt, Artificial Sequence
  source: /note="Description of Artificial Sequence: Synthetic oligonucleotide"
aagaagaugagacacucuuucug

SEQ ID NO: 4706 - RNA, 21 nt, Artificial Sequence
  source: /note="Description of Artificial Sequence: Synthetic oligonucleotide"
cagaaagagugucucaucuua

SEQ ID NO: 4707 - RNA, 23 nt, Artificial Sequence
  source: /note="Description of Artificial Sequence: Synthetic oligonucleotide"
uaagaugagacacucuuucuggu

SEQ ID NO: 4708 - RNA, 21 nt, Artificial Sequence
  source: /note="Description of Artificial Sequence: Synthetic oligonucleotide"
cagaaagagugucucaucuua

SEQ ID NO: 4709 - RNA, 23 nt, Artificial Sequence
  source: /note="Description of Artificial Sequence: Synthetic oligonucleotide"
uaagaugagacacucuuucuggu

SEQ ID NO: 4710 - RNA, 21 nt, Artificial Sequence
  source: /note="Description of Artificial Sequence: Synthetic oligonucleotide"
cagaaagagugucucaucuua

SEQ ID NO: 4711 - RNA, 23 nt, Artificial Sequence
  source: /note="Description of Artificial Sequence: Synthetic oligonucleotide"
uaagaugagacacucuuucuggu

SEQ ID NO: 4712 - RNA, 21 nt, Artificial Sequence
  source: /note="Description of Artificial Sequence: Synthetic oligonucleotide"
cagaaagagugucucaucuua

SEQ ID NO: 4713 - RNA, 23 nt, Artificial Sequence
  source: /note="Description of Artificial Sequence: Synthetic oligonucleotide"
uaagaugagacacucuuucuggu

SEQ ID NO: 4714 - RNA, 21 nt, Artificial Sequence
  source: /note="Description of Artificial Sequence: Synthetic oligonucleotide"
cagaaagagugucucaucuua

SEQ ID NO: 4715 - RNA, 23 nt, Artificial Sequence
  source: /note="Description of Artificial Sequence: Synthetic oligonucleotide"
uaagaugagacacucuuucuggu

SEQ ID NO: 4716 - RNA, 21 nt, Artificial Sequence
  source: /note="Description of Artificial Sequence: Synthetic oligonucleotide"
cagaaagagugucucaucuua

SEQ ID NO: 4717 - RNA, 23 nt, Artificial Sequence
  source: /note="Description of Artificial Sequence: Synthetic oligonucleotide"
uaagaugagacacucuuucuggu

SEQ ID NO: 4718 - RNA, 21 nt, Artificial Sequence
  source: /note="Description of Artificial Sequence: Synthetic oligonucleotide"
cagaaagagugucucaucuua

SEQ ID NO: 4719 - RNA, 23 nt, Artificial Sequence
  source: /note="Description of Artificial Sequence: Synthetic oligonucleotide"
uaagaugagacacucuuucuggu

SEQ ID NO: 4720 - RNA, 21 nt, Artificial Sequence
  source: /note="Description of Artificial Sequence: Synthetic oligonucleotide"
cagaaagagugucucaucuua

SEQ ID NO: 4721 - RNA, 23 nt, Artificial Sequence
  source: /note="Description of Artificial Sequence: Synthetic oligonucleotide"
uaagaugagacacucuuucuggu

SEQ ID NO: 4722 - RNA, 21 nt, Artificial Sequence
  source: /note="Description of Artificial Sequence: Synthetic oligonucleotide"
cagaaagagugucucaucuua

SEQ ID NO: 4723 - RNA, 23 nt, Artificial Sequence
  source: /note="Description of Artificial Sequence: Synthetic oligonucleotide"
uaagaugagacacucuuucuggu

SEQ ID NO: 4724 - RNA, 21 nt, Artificial Sequence
  source: /note="Description of Artificial Sequence: Synthetic oligonucleotide"
cagaaagagugucucaucuua

SEQ ID NO: 4725 - RNA, 23 nt, Artificial Sequence
  source: /note="Description of Artificial Sequence: Synthetic oligonucleotide"
uaagaugagacacucuuucuggu

SEQ ID NO: 4726 - RNA, 21 nt, Artificial Sequence
  source: /note="Description of Artificial Sequence: Synthetic oligonucleotide"
cagaaagagugucucaucuua

SEQ ID NO: 4727 - RNA, 23 nt, Artificial Sequence
  source: /note="Description of Artificial Sequence: Synthetic oligonucleotide"
uaagaugagacacucuuucuggu

SEQ ID NO: 4728 - RNA, 21 nt, Artificial Sequence
  source: /note="Description of Artificial Sequence: Synthetic oligonucleotide"
cagaaagagugucucaucuua

SEQ ID NO: 4729 - RNA, 23 nt, Artificial Sequence
  source: /note="Description of Artificial Sequence: Synthetic oligonucleotide"
uaagaugagacacucuuucuggu

SEQ ID NO: 4730 - RNA, 21 nt, Artificial Sequence
  source: /note="Description of Artificial Sequence: Synthetic oligonucleotide"
cagaaagagugucucaucuua

SEQ ID NO: 4731 - RNA, 23 nt, Artificial Sequence
  source: /note="Description of Artificial Sequence: Synthetic oligonucleotide"
uaagaugagacacucuuucuggu

SEQ ID NO: 4732 - RNA, 21 nt, Artificial Sequence
  source: /note="Description of Artificial Sequence: Synthetic oligonucleotide"
cagaaagagugucucaucuua

SEQ ID NO: 4733 - RNA, 23 nt, Artificial Sequence
  source: /note="Description of Artificial Sequence: Synthetic oligonucleotide"
uaagaugagacacucuuucuggu

SEQ ID NO: 4734 - RNA, 21 nt, Artificial Sequence
  source: /note="Description of Artificial Sequence: Synthetic oligonucleotide"
cagaaagagugucucaucuua

SEQ ID NO: 4735 - RNA, 23 nt, Artificial Sequence
  source: /note="Description of Artificial Sequence: Synthetic oligonucleotide"
uaagaugagacacucuuucuggu

SEQ ID NO: 4736 - RNA, 21 nt, Artificial Sequence
  source: /note="Description of Artificial Sequence: Synthetic oligonucleotide"
cagaaagagugucucaucuua

SEQ ID NO: 4737 - DNA, 23 bp, Artificial Sequence
  source: /note="Description of Artificial Sequence: Synthetic oligonucleotide"
  source: /note="Description of Combined DNA/RNA Molecule: Synthetic oligonucleotide"
uaagaugagacactcuuucuggu

SEQ ID NO: 4738 - RNA, 21 nt, Artificial Sequence
  source: /note="Description of Artificial Sequence: Synthetic oligonucleotide"
cagaaagagugucucaucuua

SEQ ID NO: 4739 - DNA, 23 bp, Artificial Sequence
  source: /note="Description of Artificial Sequence: Synthetic oligonucleotide"
  source: /note="Description of Combined DNA/RNA Molecule: Synthetic oligonucleotide"
uaagaugagacactcuuucuggu

SEQ ID NO: 4740 - RNA, 21 nt, Artificial Sequence
  source: /note="Description of Artificial Sequence: Synthetic oligonucleotide"
cagaaagagugucucaucuua

SEQ ID NO: 4741 - DNA, 23 bp, Artificial Sequence
  source: /note="Description of Artificial Sequence: Synthetic oligonucleotide"
  source: /note="Description of Combined DNA/RNA Molecule: Synthetic oligonucleotide"
uaagaugagacactcuuucuggu

SEQ ID NO: 4742 - DNA, 21 bp, Artificial Sequence
  source: /note="Description of Artificial Sequence: Synthetic oligonucleotide"
  source: /note="Description of Combined DNA/RNA Molecule: Synthetic oligonucleotide"
cagaaagagugucucaucuua

SEQ ID NO: 4743 - DNA, 23 bp, Artificial Sequence
  source: /note="Description of Artificial Sequence: Synthetic oligonucleotide"
  source: /note="Description of Combined DNA/RNA Molecule: Synthetic oligonucleotide"
uaagaugagacactcuuucuggu

SEQ ID NO: 4744 - DNA, 21 bp, Artificial Sequence
  source: /note="Description of Artificial Sequence: Synthetic oligonucleotide"
  source: /note="Description of Combined DNA/RNA Molecule: Synthetic oligonucleotide"
cagaaagagugucucaucuua

SEQ ID NO: 4745 - DNA, 23 bp, Artificial Sequence
  source: /note="Description of Artificial Sequence: Synthetic oligonucleotide"
  source: /note="Description of Combined DNA/RNA Molecule: Synthetic oligonucleotide"
uaagaugagacactcuuucuggu

SEQ ID NO: 4746 - DNA, 21 bp, Artificial Sequence
  source: /note="Description of Artificial Sequence: Synthetic oligonucleotide"
  source: /note="Description of Combined DNA/RNA Molecule: Synthetic oligonucleotide"
cagaaagagugucucaucuua

SEQ ID NO: 4747 - DNA, 23 bp, Artificial Sequence
  source: /note="Description of Artificial Sequence: Synthetic oligonucleotide"
  source: /note="Description of Combined DNA/RNA Molecule: Synthetic oligonucleotide"
uaagaugagacactcuuucuggu

SEQ ID NO: 4748 - DNA, 21 bp, Artificial Sequence
  source: /note="Description of Artificial Sequence: Synthetic oligonucleotide"
  source: /note="Description of Combined DNA/RNA Molecule: Synthetic oligonucleotide"
cagaaagagugucucatcuua

SEQ ID NO: 4749 - DNA, 23 bp, Artificial Sequence
  source: /note="Description of Artificial Sequence: Synthetic oligonucleotide"
  source: /note="Description of Combined DNA/RNA Molecule: Synthetic oligonucleotide"
uaagaugagacactcuuucuggu

SEQ ID NO: 4750 - DNA, 21 bp, Artificial Sequence
  source: /note="Description of Artificial Sequence: Synthetic oligonucleotide"
  source: /note="Description of Combined DNA/RNA Molecule: Synthetic oligonucleotide"
cagaaagagugucucauctua

SEQ ID NO: 4751 - DNA, 23 bp, Artificial Sequence
  source: /note="Description of Artificial Sequence: Synthetic oligonucleotide"
  source: /note="Description of Combined DNA/RNA Molecule: Synthetic oligonucleotide"
uaagaugagacactcuuucuggu

SEQ ID NO: 4752 - DNA, 21 bp, Artificial Sequence
  source: /note="Description of Artificial Sequence: Synthetic oligonucleotide"
  source: /note="Description of Combined DNA/RNA Molecule: Synthetic oligonucleotide"
cagaaagagugucucaucuua

SEQ ID NO: 4753 - DNA, 23 bp, Artificial Sequence
  source: /note="Description of Artificial Sequence: Synthetic oligonucleotide"
  source: /note="Description of Combined DNA/RNA Molecule: Synthetic oligonucleotide"
uaagaugagacactcuuucuggu

SEQ ID NO: 4754 - DNA, 21 bp, Artificial Sequence
  source: /note="Description of Artificial Sequence: Synthetic oligonucleotide"
  source: /note="Description of Combined DNA/RNA Molecule: Synthetic oligonucleotide"
cagaaagagugucucaucuua

SEQ ID NO: 4755 - DNA, 23 bp, Artificial Sequence
  source: /note="Description of Artificial Sequence: Synthetic oligonucleotide"
  source: /note="Description of Combined DNA/RNA Molecule: Synthetic oligonucleotide"
uaagaugagacactcuuucuggu

SEQ ID NO: 4756 - DNA, 21 bp, Artificial Sequence
  source: /note="Description of Artificial Sequence: Synthetic oligonucleotide"
  source: /note="Description of Combined DNA/RNA Molecule: Synthetic oligonucleotide"
cagaaagagugucucatcuua

SEQ ID NO: 4757 - DNA, 23 bp, Artificial Sequence
  source: /note="Description of Artificial Sequence: Synthetic oligonucleotide"
  source: /note="Description of Combined DNA/RNA Molecule: Synthetic oligonucleotide"
uaagaugagacactcuuucuggu

SEQ ID NO: 4758 - DNA, 21 bp, Artificial Sequence
  source: /note="Description of Artificial Sequence: Synthetic oligonucleotide"
  source: /note="Description of Combined DNA/RNA Molecule: Synthetic oligonucleotide"
cagaaagagugucucatcuua

SEQ ID NO: 4759 - DNA, 23 bp, Artificial Sequence
  source: /note="Description of Artificial Sequence: Synthetic oligonucleotide"
  source: /note="Description of Combined DNA/RNA Molecule: Synthetic oligonucleotide"
uaagaugagacactcuuucuggu

SEQ ID NO: 4760 - DNA, 21 bp, Artificial Sequence
  source: /note="Description of Artificial Sequence: Synthetic oligonucleotide"
  source: /note="Description of Combined DNA/RNA Molecule: Synthetic oligonucleotide"
cagaaagagugucucatcuua

SEQ ID NO: 4761 - DNA, 23 bp, Artificial Sequence
  source: /note="Description of Artificial Sequence: Synthetic oligonucleotide"
  source: /note="Description of Combined DNA/RNA Molecule: Synthetic oligonucleotide"
uaagaugagacactcuuucuggu

SEQ ID NO: 4762 - RNA, 21 nt, Artificial Sequence
  source: /note="Description of Artificial Sequence: Synthetic oligonucleotide"
cagaaagagugucucaucuua

SEQ ID NO: 4763 - DNA, 23 bp, Artificial Sequence
  source: /note="Description of Artificial Sequence: Synthetic oligonucleotide"
  source: /note="Description of Combined DNA/RNA Molecule: Synthetic oligonucleotide"
uaagatgagacactcuuucuggu

SEQ ID NO: 4764 - RNA, 21 nt, Artificial Sequence
  source: /note="Description of Artificial Sequence: Synthetic oligonucleotide"
cagaaagagugucucaucuua

SEQ ID NO: 4765 - DNA, 23 bp, Artificial Sequence
  source: /note="Description of Artificial Sequence: Synthetic oligonucleotide"
  source: /note="Description of Combined DNA/RNA Molecule: Synthetic oligonucleotide"
uaagatgagacactcuuucuggu

SEQ ID NO: 4766 - RNA, 21 nt, Artificial Sequence
  source: /note="Description of Artificial Sequence: Synthetic oligonucleotide"
cagaaagagugucucaucuua

SEQ ID NO: 4767 - DNA, 23 bp, Artificial Sequence
  source: /note="Description of Artificial Sequence: Synthetic oligonucleotide"
  source: /note="Description of Combined DNA/RNA Molecule: Synthetic oligonucleotide"
uaagatgagacactcuuucuggu

SEQ ID NO: 4768 - RNA, 21 nt, Artificial Sequence
  source: /note="Description of Artificial Sequence: Synthetic oligonucleotide"
cagaaagagugucucaucuua

SEQ ID NO: 4769 - DNA, 23 bp, Artificial Sequence
  source: /note="Description of Artificial Sequence: Synthetic oligonucleotide"
  source: /note="Description of Combined DNA/RNA Molecule: Synthetic oligonucleotide"
uaagaugagacactctuucuggu

SEQ ID NO: 4770 - RNA, 21 nt, Artificial Sequence
  source: /note="Description of Artificial Sequence: Synthetic oligonucleotide"
cagaaagagugucucaucuua

SEQ ID NO: 4771 - DNA, 23 bp, Artificial Sequence
  source: /note="Description of Artificial Sequence: Synthetic oligonucleotide"
  source: /note="Description of Combined DNA/RNA Molecule: Synthetic oligonucleotide"
uaagaugagacactcuutcuggu

SEQ ID NO: 4772 - RNA, 21 nt, Artificial Sequence
  source: /note="Description of Artificial Sequence: Synthetic oligonucleotide"
cagaaagagugucucaucuua

SEQ ID NO: 4773 - DNA, 23 bp, Artificial Sequence
  source: /note="Description of Artificial Sequence: Synthetic oligonucleotide"
  source: /note="Description of Combined DNA/RNA Molecule: Synthetic oligonucleotide"
uaagatgagacactcuutcuggu

SEQ ID NO: 4774 - RNA, 21 nt, Artificial Sequence
  source: /note="Description of Artificial Sequence: Synthetic oligonucleotide"
cagaaagagugucucaucuua

SEQ ID NO: 4775 - DNA, 23 bp, Artificial Sequence
  source: /note="Description of Artificial Sequence: Synthetic oligonucleotide"
  source: /note="Description of Combined DNA/RNA Molecule: Synthetic oligonucleotide"
uaagaugagacactcuuucuggu

SEQ ID NO: 4776 - RNA, 21 nt, Artificial Sequence
  source: /note="Description of Artificial Sequence: Synthetic oligonucleotide"
cagaaagagugucucaucuua

SEQ ID NO: 4777 - DNA, 23 bp, Artificial Sequence
  source: /note="Description of Artificial Sequence: Synthetic oligonucleotide"
  source: /note="Description of Combined DNA/RNA Molecule: Synthetic oligonucleotide"
uaagaugagacactcuuucuggu

SEQ ID NO: 4778 - RNA, 21 nt, Artificial Sequence
  source: /note="Description of Artificial Sequence: Synthetic oligonucleotide"
cagaaagagugucucaucuua

SEQ ID NO: 4779 - DNA, 23 bp, Artificial Sequence
  source: /note="Description of Artificial Sequence: Synthetic oligonucleotide"
  source: /note="Description of Combined DNA/RNA Molecule: Synthetic oligonucleotide"
uaagaugagacactcuuucuggu

SEQ ID NO: 4780 - RNA, 21 nt, Artificial Sequence
  source: /note="Description of Artificial Sequence: Synthetic oligonucleotide"
gagaaagagugucucaucuua

SEQ ID NO: 4781 - RNA, 23 nt, Artificial Sequence
  source: /note="Description of Artificial Sequence: Synthetic oligonucleotide"
uaagaugagacacucuuucucca

SEQ ID NO: 4782 - RNA, 21 nt, Artificial Sequence
  source: /note="Description of Artificial Sequence: Synthetic oligonucleotide"
gugaaagagugucucaucuua

SEQ ID NO: 4783 - RNA, 23 nt, Artificial Sequence
  source: /note="Description of Artificial Sequence: Synthetic oligonucleotide"
uaagaugagacacucuuucacca

SEQ ID NO: 4784 - RNA, 21 nt, Artificial Sequence
  source: /note="Description of Artificial Sequence: Synthetic oligonucleotide"
gucaaagagugucucaucuua

SEQ ID NO: 4785 - RNA, 23 nt, Artificial Sequence
  source: /note="Description of Artificial Sequence: Synthetic oligonucleotide"
uaagaugagacacucuuugacca

SEQ ID NO: 4786 - RNA, 21 nt, Artificial Sequence
  source: /note="Description of Artificial Sequence: Synthetic oligonucleotide"
gucaaagagugucucaucuua

SEQ ID NO: 4787 - RNA, 23 nt, Artificial Sequence
  source: /note="Description of Artificial Sequence: Synthetic oligonucleotide"
uaagaugagacacucuuugacgu

SEQ ID NO: 4788 - RNA, 21 nt, Artificial Sequence
  source: /note="Description of Artificial Sequence: Synthetic oligonucleotide"
cucuaagagugucucaucuua

SEQ ID NO: 4789 - RNA, 23 nt, Artificial Sequence
  source: /note="Description of Artificial Sequence: Synthetic oligonucleotide"
uaagaugagacacucuuagaggu

SEQ ID NO: 4790 - RNA, 21 nt, Artificial Sequence
  source: /note="Description of Artificial Sequence: Synthetic oligonucleotide"
cucuuagagugucucaucuua

SEQ ID NO: 4791 - RNA, 23 nt, Artificial Sequence
  source: /note="Description of Artificial Sequence: Synthetic oligonucleotide"
uaagaugagacacucuaaguggu

SEQ ID NO: 4792 - RNA, 21 nt, Artificial Sequence
  source: /note="Description of Artificial Sequence: Synthetic oligonucleotide"
cuguuugagugucucaucuua

SEQ ID NO: 4793 - RNA, 23 nt, Artificial Sequence
  source: /note="Description of Artificial Sequence: Synthetic oligonucleotide"
uaagaugagacacucaaacuggu

SEQ ID NO: 4794 - RNA, 21 nt, Artificial Sequence
  source: /note="Description of Artificial Sequence: Synthetic oligonucleotide"
cagaaagagugucucaucuua

SEQ ID NO: 4795 - DNA, 23 bp, Artificial Sequence
  source: /note="Description of Artificial Sequence: Synthetic oligonucleotide"
  source: /note="Description of Combined DNA/RNA Molecule: Synthetic oligonucleotide"
taagaugagacacucuuucuggu

SEQ ID NO: 4796 - RNA, 21 nt, Artificial Sequence
  source: /note="Description of Artificial Sequence: Synthetic oligonucleotide"
cagaaagagugucucaucuua

SEQ ID NO: 4797 - RNA, 23 nt, Artificial Sequence
  source: /note="Description of Artificial Sequence: Synthetic oligonucleotide"
uaagaugagacacucuuucuggu

SEQ ID NO: 4798 - RNA, 21 nt, Artificial Sequence
  source: /note="Description of Artificial Sequence: Synthetic oligonucleotide"
cagaaagagugucucaucuua

SEQ ID NO: 4799 - RNA, 23 nt, Artificial Sequence
  source: /note="Description of Artificial Sequence: Synthetic oligonucleotide"
uaagaugagacacucuuucuggu

SEQ ID NO: 4800 - RNA, 21 nt, Artificial Sequence
  source: /note="Description of Artificial Sequence: Synthetic oligonucleotide"
cagaaagagugucucaucuua

SEQ ID NO: 4801 - RNA, 24 nt, Artificial Sequence
  source: /note="Description of Artificial Sequence: Synthetic oligonucleotide"
uaagaaugagacacucuuucuggu

SEQ ID NO: 4802 - RNA, 21 nt, Artificial Sequence
  source: /note="Description of Artificial Sequence: Synthetic oligonucleotide"
cagaaagagugucucaucuua

SEQ ID NO: 4803 - DNA, 23 bp, Artificial Sequence
  source: /note="Description of Artificial Sequence: Synthetic oligonucleotide"
  source: /note="Description of Combined DNA/RNA Molecule: Synthetic oligonucleotide"
uaagatgagacacucuuucuggu

SEQ ID NO: 4804 - RNA, 21 nt, Artificial Sequence
  source: /note="Description of Artificial Sequence: Synthetic oligonucleotide"
cagaaagagugucucaucuua

SEQ ID NO: 4805 - RNA, 23 nt, Artificial Sequence
  source: /note="Description of Artificial Sequence: Synthetic oligonucleotide"
uaagaugagacacucuuucuggu

SEQ ID NO: 4806 - RNA, 21 nt, Artificial Sequence
  source: /note="Description of Artificial Sequence: Synthetic oligonucleotide"
cagaaagagugucucaucuua

SEQ ID NO: 4807 - RNA, 23 nt, Artificial Sequence
  source: /note="Description of Artificial Sequence: Synthetic oligonucleotide"
uaagaugagacacucuuucuggu

SEQ ID NO: 4808 - RNA, 21 nt, Artificial Sequence
  source: /note="Description of Artificial Sequence: Synthetic oligonucleotide"
cagaaagagugucucaucuua

SEQ ID NO: 4809 - RNA, 23 nt, Artificial Sequence
  source: /note="Description of Artificial Sequence: Synthetic oligonucleotide"
uaagaugagacacucuuucuggu

SEQ ID NO: 4810 - RNA, 21 nt, Artificial Sequence
  source: /note="Description of Artificial Sequence: Synthetic oligonucleotide"
cagaaagagugucucaucuua

SEQ ID NO: 4811 - RNA, 23 nt, Artificial Sequence
  source: /note="Description of Artificial Sequence: Synthetic oligonucleotide"
uaagaugagacacucuuucuggu

SEQ ID NO: 4812 - RNA, 21 nt, Artificial Sequence
  source: /note="Description of Artificial Sequence: Synthetic oligonucleotide"
cagaaagagugucucaucuua

SEQ ID NO: 4813 - RNA, 23 nt, Artificial Sequence
  source: /note="Description of Artificial Sequence: Synthetic oligonucleotide"
uaagaugagacacucuuucuggu

SEQ ID NO: 4814 - RNA, 21 nt, Artificial Sequence
  source: /note="Description of Artificial Sequence: Synthetic oligonucleotide"
cagaaagagugucucaucuua

SEQ ID NO: 4815 - RNA, 23 nt, Artificial Sequence
  source: /note="Description of Artificial Sequence: Synthetic oligonucleotide"
uaagaugagacacucuuucuggu

SEQ ID NO: 4816 - RNA, 21 nt, Artificial Sequence
  source: /note="Description of Artificial Sequence: Synthetic oligonucleotide"
cagaaagagugucucaucuua

SEQ ID NO: 4817 - RNA, 23 nt, Artificial Sequence
  source: /note="Description of Artificial Sequence: Synthetic oligonucleotide"
aagaagaugagacacucuuucug

SEQ ID NO: 4818 - DNA, 21 bp, Artificial Sequence
  source: /note="Description of Artificial Sequence: Synthetic oligonucleotide"
  source: /note="Description of Combined DNA/RNA Molecule: Synthetic oligonucleotide"
cagaaagagugucucaucuta

SEQ ID NO: 4819 - RNA, 23 nt, Artificial Sequence
  source: /note="Description of Artificial Sequence: Synthetic oligonucleotide"
aagaagaugagacacucuuucug

SEQ ID NO: 4820 - DNA, 21 bp, Artificial Sequence
  source: /note="Description of Artificial Sequence: Synthetic oligonucleotide"
  source: /note="Description of Combined DNA/RNA Molecule: Synthetic oligonucleotide"
cagaaagagugucucauctua

SEQ ID NO: 4821 - RNA, 23 nt, Artificial Sequence
  source: /note="Description of Artificial Sequence: Synthetic oligonucleotide"
aagaagaugagacacucuuucug

SEQ ID NO: 4822 - RNA, 21 nt, Artificial Sequence
  source: /note="Description of Artificial Sequence: Synthetic oligonucleotide"
cagaaagagugucucaucuua

SEQ ID NO: 4823 - RNA, 23 nt, Artificial Sequence
  source: /note="Description of Artificial Sequence: Synthetic oligonucleotide"
aagaagaugagacacucuuucug

SEQ ID NO: 4824 - DNA, 21 bp, Artificial Sequence
  source: /note="Description of Artificial Sequence: Synthetic oligonucleotide"
  source: /note="Description of Combined DNA/RNA Molecule: Synthetic oligonucleotide"
cagaaagagugucucatcuua

SEQ ID NO: 4825 - RNA, 23 nt, Artificial Sequence
  source: /note="Description of Artificial Sequence: Synthetic oligonucleotide"
aagaagaugagacacucuuucug

SEQ ID NO: 4826 - RNA, 21 nt, Artificial Sequence
  source: /note="Description of Artificial Sequence: Synthetic oligonucleotide"
cagaaagagugucucaucuua

SEQ ID NO: 4827 - RNA, 23 nt, Artificial Sequence
  source: /note="Description of Artificial Sequence: Synthetic oligonucleotide"
aagaagaugagacacucuuucug

SEQ ID NO: 4828 - RNA, 21 nt, Artificial Sequence
  source: /note="Description of Artificial Sequence: Synthetic oligonucleotide"
cagaaagagugucucaucuua

SEQ ID NO: 4829 - RNA, 23 nt, Artificial Sequence
  source: /note="Description of Artificial Sequence: Synthetic oligonucleotide"
aagaagaugagacacucuuucug

SEQ ID NO: 4830 - DNA, 21 bp, Artificial Sequence
  source: /note="Description of Artificial Sequence: Synthetic oligonucleotide"
  source: /note="Description of Combined DNA/RNA Molecule: Synthetic oligonucleotide"
cagaaagaguguctcaucuua

SEQ ID NO: 4831 - RNA, 23 nt, Artificial Sequence
  source: /note="Description of Artificial Sequence: Synthetic oligonucleotide"
aagaagaugagacacucuuucug

SEQ ID NO: 4832 - RNA, 21 nt, Artificial Sequence
  source: /note="Description of Artificial Sequence: Synthetic oligonucleotide"
cagaaagagugucucaucuua

SEQ ID NO: 4833 - RNA, 23 nt, Artificial Sequence
  source: /note="Description of Artificial Sequence: Synthetic oligonucleotide"
aagaagaugagacacucuuucug

SEQ ID NO: 4834 - DNA, 21 bp, Artificial Sequence
  source: /note="Description of Artificial Sequence: Synthetic oligonucleotide"
  source: /note="Description of Combined DNA/RNA Molecule: Synthetic oligonucleotide"
cagaaagagugtcucaucuua

SEQ ID NO: 4835 - RNA, 23 nt, Artificial Sequence
  source: /note="Description of Artificial Sequence: Synthetic oligonucleotide"
aagaagaugagacacucuuucug

SEQ ID NO: 4836 - RNA, 21 nt, Artificial Sequence
  source: /note="Description of Artificial Sequence: Synthetic oligonucleotide"
cagaaagagugucucaucuua

SEQ ID NO: 4837 - RNA, 23 nt, Artificial Sequence
  source: /note="Description of Artificial Sequence: Synthetic oligonucleotide"
aagaagaugagacacucuuucug

SEQ ID NO: 4838 - DNA, 21 bp, Artificial Sequence
  source: /note="Description of Artificial Sequence: Synthetic oligonucleotide"
  source: /note="Description of Combined DNA/RNA Molecule: Synthetic oligonucleotide"
cagaaagagtgucucaucuua

SEQ ID NO: 4839 - RNA, 23 nt, Artificial Sequence
  source: /note="Description of Artificial Sequence: Synthetic oligonucleotide"
aagaagaugagacacucuuucug

SEQ ID NO: 4840 - DNA, 21 bp, Artificial Sequence
  source: /note="Description of Artificial Sequence: Synthetic oligonucleotide"
  source: /note="Description of Combined DNA/RNA Molecule: Synthetic oligonucleotide"
cagaaagagugucucauctua

SEQ ID NO: 4841 - RNA, 23 nt, Artificial Sequence
  source: /note="Description of Artificial Sequence: Synthetic oligonucleotide"
uaagaugagacacucuuucuggu

SEQ ID NO: 4842 - RNA, 21 nt, Artificial Sequence
  source: /note="Description of Artificial Sequence: Synthetic oligonucleotide"
cagaaagagugucucaucuua

SEQ ID NO: 4843 - RNA, 23 nt, Artificial Sequence
  source: /note="Description of Artificial Sequence: Synthetic oligonucleotide"
uaagaugagacacucuuucuggu

SEQ ID NO: 4844 - DNA, 21 bp, Artificial Sequence
  source: /note="Description of Artificial Sequence: Synthetic oligonucleotide"
  source: /note="Description of Combined DNA/RNA Molecule: Synthetic oligonucleotide"
cagaaagagugucucatcuua

SEQ ID NO: 4845 - RNA, 24 nt, Artificial Sequence
  source: /note="Description of Artificial Sequence: Synthetic oligonucleotide"
uaagaaugagacacucuuucuggu

SEQ ID NO: 4846 - RNA, 21 nt, Artificial Sequence
  source: /note="Description of Artificial Sequence: Synthetic oligonucleotide"
cagaaagagugucucaucuua

SEQ ID NO: 4847 - DNA, 23 bp, Artificial Sequence
  source: /note="Description of Artificial Sequence: Synthetic oligonucleotide"
  source: /note="Description of Combined DNA/RNA Molecule: Synthetic oligonucleotide"
uaagatgagacacucuuucuggu

SEQ ID NO: 4848 - RNA, 21 nt, Artificial Sequence
  source: /note="Description of Artificial Sequence: Synthetic oligonucleotide"
cagaaagagugucucaucuua

SEQ ID NO: 4849 - RNA, 23 nt, Artificial Sequence
  source: /note="Description of Artificial Sequence: Synthetic oligonucleotide"
uaagaugagacacucuuucuggu

SEQ ID NO: 4850 - DNA, 21 bp, Artificial Sequence
  source: /note="Description of Artificial Sequence: Synthetic oligonucleotide"
  source: /note="Description of Combined DNA/RNA Molecule: Synthetic oligonucleotide"
cagaaagaguguctcaucuua

SEQ ID NO: 4851 - RNA, 23 nt, Artificial Sequence
  source: /note="Description of Artificial Sequence: Synthetic oligonucleotide"
uaagaugagacacucuuucuggu

SEQ ID NO: 4852 - RNA, 21 nt, Artificial Sequence
  source: /note="Description of Artificial Sequence: Synthetic oligonucleotide"
cagaaagagugucucaucuua

SEQ ID NO: 4853 - RNA, 23 nt, Artificial Sequence
  source: /note="Description of Artificial Sequence: Synthetic oligonucleotide"
uaagaugagacacucuuucuggu

SEQ ID NO: 4854 - DNA, 21 bp, Artificial Sequence
  source: /note="Description of Artificial Sequence: Synthetic oligonucleotide"
  source: /note="Description of Combined DNA/RNA Molecule: Synthetic oligonucleotide"
cagaaagagugtcucaucuua

SEQ ID NO: 4855 - RNA, 23 nt, Artificial Sequence
  source: /note="Description of Artificial Sequence: Synthetic oligonucleotide"
uaagaugagacacucuuucuggu

SEQ ID NO: 4856 - RNA, 21 nt, Artificial Sequence
  source: /note="Description of Artificial Sequence: Synthetic oligonucleotide"
cagaaagagugucucaucuua

SEQ ID NO: 4857 - RNA, 23 nt, Artificial Sequence
  source: /note="Description of Artificial Sequence: Synthetic oligonucleotide"
uaagaugagacacucuuucuggu

SEQ ID NO: 4858 - DNA, 21 bp, Artificial Sequence
  source: /note="Description of Artificial Sequence: Synthetic oligonucleotide"
  source: /note="Description of Combined DNA/RNA Molecule: Synthetic oligonucleotide"
cagaaagagtgucucaucuua

SEQ ID NO: 4859 - RNA, 23 nt, Artificial Sequence
  source: /note="Description of Artificial Sequence: Synthetic oligonucleotide"
uaagaugagacacucuuucuggu

SEQ ID NO: 4860 - RNA, 21 nt, Artificial Sequence
  source: /note="Description of Artificial Sequence: Synthetic oligonucleotide"
cagaaagagugucucaucuua

SEQ ID NO: 4861 - RNA, 23 nt, Artificial Sequence
  source: /note="Description of Artificial Sequence: Synthetic oligonucleotide"
uaagaugagacacucuuucuggu

SEQ ID NO: 4862 - RNA, 21 nt, Artificial Sequence
  source: /note="Description of Artificial Sequence: Synthetic oligonucleotide"
cagaaagagugucucaucuua

SEQ ID NO: 4863 - RNA, 23 nt, Artificial Sequence
  source: /note="Description of Artificial Sequence: Synthetic oligonucleotide"
uaagaugagacacucuuucuggu

SEQ ID NO: 4864 - RNA, 21 nt, Artificial Sequence
  source: /note="Description of Artificial Sequence: Synthetic oligonucleotide"
cagaaagagugucucaucuua

SEQ ID NO: 4865 - RNA, 23 nt, Artificial Sequence
  source: /note="Description of Artificial Sequence: Synthetic oligonucleotide"
uaagaugagacacucuuucuggu

SEQ ID NO: 4866 - RNA, 21 nt, Artificial Sequence
  source: /note="Description of Artificial Sequence: Synthetic oligonucleotide"
cagaaagagugucucaucuua

SEQ ID NO: 4867 - RNA, 23 nt, Artificial Sequence
  source: /note="Description of Artificial Sequence: Synthetic oligonucleotide"
uaagaugagacacucuuucuggu

SEQ ID NO: 4868 - RNA, 21 nt, Artificial Sequence
  source: /note="Description of Artificial Sequence: Synthetic oligonucleotide"
cagaaagagugucucaucuua

SEQ ID NO: 4869 - RNA, 23 nt, Artificial Sequence
  source: /note="Description of Artificial Sequence: Synthetic oligonucleotide"
uaagaugagacacucuuucuggu

SEQ ID NO: 4870 - RNA, 21 nt, Artificial Sequence
  source: /note="Description of Artificial Sequence: Synthetic oligonucleotide"
cagaaagagugucucaucuua

SEQ ID NO: 4871 - RNA, 23 nt, Artificial Sequence
  source: /note="Description of Artificial Sequence: Synthetic oligonucleotide"
uaagaugagacacucuuucuggu

SEQ ID NO: 4872 - RNA, 21 nt, Artificial Sequence
  source: /note="Description of Artificial Sequence: Synthetic oligonucleotide"
cagaaagagugucucaucuua

SEQ ID NO: 4873 - RNA, 23 nt, Artificial Sequence
  source: /note="Description of Artificial Sequence: Synthetic oligonucleotide"
uaagaugagacacucuuucuggu

SEQ ID NO: 4874 - RNA, 21 nt, Artificial Sequence
  source: /note="Description of Artificial Sequence: Synthetic oligonucleotide"
cagaaagagugucucaucuua

SEQ ID NO: 4875 - RNA, 23 nt, Artificial Sequence
  source: /note="Description of Artificial Sequence: Synthetic oligonucleotide"
uaagaugagacacucuuucuggu

SEQ ID NO: 4876 - RNA, 21 nt, Artificial Sequence
  source: /note="Description of Artificial Sequence: Synthetic oligonucleotide"
cagaaagagugucucaucuua

SEQ ID NO: 4877 - DNA, 23 bp, Artificial Sequence
  source: /note="Description of Artificial Sequence: Synthetic oligonucleotide"
  source: /note="Description of Combined DNA/RNA Molecule: Synthetic oligonucleotide"
uaagatgagacactcuutcuggu

SEQ ID NO: 4878 - RNA, 21 nt, Artificial Sequence
  source: /note="Description of Artificial Sequence: Synthetic oligonucleotide"
cagaaagagugucucaucuua

SEQ ID NO: 4879 - DNA, 23 bp, Artificial Sequence
  source: /note="Description of Artificial Sequence: Synthetic oligonucleotide"
  source: /note="Description of Combined DNA/RNA Molecule: Synthetic oligonucleotide"
uaagatgagacactcuutcuggu

SEQ ID NO: 4880 - RNA, 21 nt, Artificial Sequence
  source: /note="Description of Artificial Sequence: Synthetic oligonucleotide"
cagaaagagugucucaucuua

SEQ ID NO: 4881 - DNA, 23 bp, Artificial Sequence
  source: /note="Description of Artificial Sequence: Synthetic oligonucleotide"
  source: /note="Description of Combined DNA/RNA Molecule: Synthetic oligonucleotide"
uaagatgagacactcuutcuggu

SEQ ID NO: 4882 - RNA, 21 nt, Artificial Sequence
  source: /note="Description of Artificial Sequence: Synthetic oligonucleotide"
cagaaagagugucucaucuua

SEQ ID NO: 4883 - RNA, 23 nt, Artificial Sequence
  source: /note="Description of Artificial Sequence: Synthetic oligonucleotide"
uaagaugagacacucuuucuggu

SEQ ID NO: 4884 - RNA, 21 nt, Artificial Sequence
  source: /note="Description of Artificial Sequence: Synthetic oligonucleotide"
cagaaagagugucucaucuua

SEQ ID NO: 4885 - RNA, 23 nt, Artificial Sequence
  source: /note="Description of Artificial Sequence: Synthetic oligonucleotide"
uaagaugagacacucuuucuggu

SEQ ID NO: 4886 - RNA, 21 nt, Artificial Sequence
  source: /note="Description of Artificial Sequence: Synthetic oligonucleotide"
cagaaagagugucucaucuua

SEQ ID NO: 4887 - RNA, 23 nt, Artificial Sequence
  source: /note="Description of Artificial Sequence: Synthetic oligonucleotide"
uaagaugagacacucuuucuggu

SEQ ID NO: 4888 - RNA, 21 nt, Artificial Sequence
  source: /note="Description of Artificial Sequence: Synthetic oligonucleotide"
cagaaagagugucucaucuua

SEQ ID NO: 4889 - DNA, 23 bp, Artificial Sequence
  source: /note="Description of Artificial Sequence: Synthetic oligonucleotide"
  source: /note="Description of Combined DNA/RNA Molecule: Synthetic oligonucleotide"
uaagatgagacactcuutcuggu

SEQ ID NO: 4890 - RNA, 21 nt, Artificial Sequence
  source: /note="Description of Artificial Sequence: Synthetic oligonucleotide"
cagaaagagugucucaucuua

SEQ ID NO: 4891 - DNA, 23 bp, Artificial Sequence
  source: /note="Description of Artificial Sequence: Synthetic oligonucleotide"
  source: /note="Description of Combined DNA/RNA Molecule: Synthetic oligonucleotide"
uaagatgagacactcuutcuggu

SEQ ID NO: 4892 - RNA, 21 nt, Artificial Sequence
  source: /note="Description of Artificial Sequence: Synthetic oligonucleotide"
cagaaagagugucucaucuua

SEQ ID NO: 4893 - DNA, 23 bp, Artificial Sequence
  source: /note="Description of Artificial Sequence: Synthetic oligonucleotide"
  source: /note="Description of Combined DNA/RNA Molecule: Synthetic oligonucleotide"
uaagatgagacactcuutcuggu

SEQ ID NO: 4894 - RNA, 21 nt, Artificial Sequence
  source: /note="Description of Artificial Sequence: Synthetic oligonucleotide"
cagaaagagugucucaucuua

SEQ ID NO: 4895 - RNA, 23 nt, Artificial Sequence
  source: /note="Description of Artificial Sequence: Synthetic oligonucleotide"
uaagaugagacacucuuucuggu

SEQ ID NO: 4896 - RNA, 21 nt, Artificial Sequence
  source: /note="Description of Artificial Sequence: Synthetic oligonucleotide"
cagaaagagugucucaucuua

SEQ ID NO: 4897 - RNA, 23 nt, Artificial Sequence
  source: /note="Description of Artificial Sequence: Synthetic oligonucleotide"
uaagaugagacacucuuucuggu

SEQ ID NO: 4898 - RNA, 21 nt, Artificial Sequence
  source: /note="Description of Artificial Sequence: Synthetic oligonucleotide"
cagaaagagugucucaucuua

SEQ ID NO: 4899 - RNA, 23 nt, Artificial Sequence
  source: /note="Description of Artificial Sequence: Synthetic oligonucleotide"
uaagaugagacacucuuucuggu

SEQ ID NO: 4900 - RNA, 21 nt, Artificial Sequence
  source: /note="Description of Artificial Sequence: Synthetic oligonucleotide"
cagaaagagugucucaucuua

SEQ ID NO: 4901 - DNA, 23 bp, Artificial Sequence
  source: /note="Description of Artificial Sequence: Synthetic oligonucleotide"
  source: /note="Description of Combined DNA/RNA Molecule: Synthetic oligonucleotide"
uaagatgagacactcuutcuggu

SEQ ID NO: 4902 - RNA, 21 nt, Artificial Sequence
  source: /note="Description of Artificial Sequence: Synthetic oligonucleotide"
cagaaagagugucucaucuua

SEQ ID NO: 4903 - DNA, 23 bp, Artificial Sequence
  source: /note="Description of Artificial Sequence: Synthetic oligonucleotide"
  source: /note="Description of Combined DNA/RNA Molecule: Synthetic oligonucleotide"
uaagatgagacactcuutcuggu

SEQ ID NO: 4904 - RNA, 21 nt, Artificial Sequence
  source: /note="Description of Artificial Sequence: Synthetic oligonucleotide"
cagaaagagugucucaucuua

SEQ ID NO: 4905 - DNA, 23 bp, Artificial Sequence
  source: /note="Description of Artificial Sequence: Synthetic oligonucleotide"
  source: /note="Description of Combined DNA/RNA Molecule: Synthetic oligonucleotide"
uaagatgagacactcuutcuggu

SEQ ID NO: 4906 - RNA, 21 nt, Artificial Sequence
  source: /note="Description of Artificial Sequence: Synthetic oligonucleotide"
cagaaagagugucucaucuua

SEQ ID NO: 4907 - RNA, 23 nt, Artificial Sequence
  source: /note="Description of Artificial Sequence: Synthetic oligonucleotide"
uaagaugagacacucuuucuggu

SEQ ID NO: 4908 - RNA, 21 nt, Artificial Sequence
  source: /note="Description of Artificial Sequence: Synthetic oligonucleotide"
cagaaagagugucucaucuua

SEQ ID NO: 4909 - RNA, 23 nt, Artificial Sequence
  source: /note="Description of Artificial Sequence: Synthetic oligonucleotide"
uaagaugagacacucuuucuggu

SEQ ID NO: 4910 - RNA, 21 nt, Artificial Sequence
  source: /note="Description of Artificial Sequence: Synthetic oligonucleotide"
cagaaagagugucucaucuua

SEQ ID NO: 4911 - RNA, 23 nt, Artificial Sequence
  source: /note="Description of Artificial Sequence: Synthetic oligonucleotide"
uaagaugagacacucuuucuggu

SEQ ID NO: 4912 - RNA, 21 nt, Artificial Sequence
  source: /note="Description of Artificial Sequence: Synthetic oligonucleotide"
cagaaagagugucucaucuua

SEQ ID NO: 4913 - DNA, 23 bp, Artificial Sequence
  source: /note="Description of Artificial Sequence: Synthetic oligonucleotide"
  source: /note="Description of Combined DNA/RNA Molecule: Synthetic oligonucleotide"
uaagatgagacactcuutcuggu

SEQ ID NO: 4914 - RNA, 21 nt, Artificial Sequence
  source: /note="Description of Artificial Sequence: Synthetic oligonucleotide"
cagaaagagugucucaucuua

SEQ ID NO: 4915 - DNA, 23 bp, Artificial Sequence
  source: /note="Description of Artificial Sequence: Synthetic oligonucleotide"
  source: /note="Description of Combined DNA/RNA Molecule: Synthetic oligonucleotide"
uaagatgagacactcuutcuggu

SEQ ID NO: 4916 - RNA, 21 nt, Artificial Sequence
  source: /note="Description of Artificial Sequence: Synthetic oligonucleotide"
cagaaagagugucucaucuua

SEQ ID NO: 4917 - DNA, 23 bp, Artificial Sequence
  source: /note="Description of Artificial Sequence: Synthetic oligonucleotide"
  source: /note="Description of Combined DNA/RNA Molecule: Synthetic oligonucleotide"
uaagatgagacactcuutcuggu

SEQ ID NO: 4918 - RNA, 21 nt, Artificial Sequence
  source: /note="Description of Artificial Sequence: Synthetic oligonucleotide"
cagaaagagugucucaucuua

SEQ ID NO: 4919 - DNA, 23 bp, Artificial Sequence
  source: /note="Description of Artificial Sequence: Synthetic oligonucleotide"
  source: /note="Description of Combined DNA/RNA Molecule: Synthetic oligonucleotide"
uaagatgagacactcuutcuggu

SEQ ID NO: 4920 - RNA, 21 nt, Artificial Sequence
  source: /note="Description of Artificial Sequence: Synthetic oligonucleotide"
cagaaagagugucucaucuua

SEQ ID NO: 4921 - RNA, 23 nt, Artificial Sequence
  source: /note="Description of Artificial Sequence: Synthetic oligonucleotide"
uaagaugagacacucuuucuggu

SEQ ID NO: 4922 - RNA, 21 nt, Artificial Sequence
  source: /note="Description of Artificial Sequence: Synthetic oligonucleotide"
cagaaagagugucucaucuua

SEQ ID NO: 4923 - RNA, 23 nt, Artificial Sequence
  source: /note="Description of Artificial Sequence: Synthetic oligonucleotide"
uaagaugagacacucuuucuggu

SEQ ID NO: 4924 - RNA, 21 nt, Artificial Sequence
  source: /note="Description of Artificial Sequence: Synthetic oligonucleotide"
cagaaagagugucucaucuua

SEQ ID NO: 4925 - RNA, 23 nt, Artificial Sequence
  source: /note="Description of Artificial Sequence: Synthetic oligonucleotide"
uaagaugagacacucuuucuggu

SEQ ID NO: 4926 - RNA, 21 nt, Artificial Sequence
  source: /note="Description of Artificial Sequence: Synthetic oligonucleotide"
cagaaagagugucucaucuua

SEQ ID NO: 4927 - DNA, 23 bp, Artificial Sequence
  source: /note="Description of Artificial Sequence: Synthetic oligonucleotide"
  source: /note="Description of Combined DNA/RNA Molecule: Synthetic oligonucleotide"
uaagatgagacactcuutcuggu

SEQ ID NO: 4928 - RNA, 21 nt, Artificial Sequence
  source: /note="Description of Artificial Sequence: Synthetic oligonucleotide"
cagaaagagugucucaucuua

SEQ ID NO: 4929 - DNA, 23 bp, Artificial Sequence
  source: /note="Description of Artificial Sequence: Synthetic oligonucleotide"
  source: /note="Description of Combined DNA/RNA Molecule: Synthetic oligonucleotide"
uaagatgagacactcuutcuggu

SEQ ID NO: 4930 - DNA, 21 bp, Artificial Sequence
  source: /note="Description of Artificial Sequence: Synthetic oligonucleotide"
  source: /note="Description of Combined DNA/RNA Molecule: Synthetic oligonucleotide"
cagaaagagugucucatcuua

SEQ ID NO: 4931 - RNA, 23 nt, Artificial Sequence
  source: /note="Description of Artificial Sequence: Synthetic oligonucleotide"
uaagaugagacacucuuucuggu

SEQ ID NO: 4932 - DNA, 21 bp, Artificial Sequence
  source: /note="Description of Artificial Sequence: Synthetic oligonucleotide"
  source: /note="Description of Combined DNA/RNA Molecule: Synthetic oligonucleotide"
cagaaagagugucucatcuua

SEQ ID NO: 4933 - RNA, 23 nt, Artificial Sequence
  source: /note="Description of Artificial Sequence: Synthetic oligonucleotide"
uaagaugagacacucuuucuggu

SEQ ID NO: 4934 - DNA, 21 bp, Artificial Sequence
  source: /note="Description of Artificial Sequence: Synthetic oligonucleotide"
  source: /note="Description of Combined DNA/RNA Molecule: Synthetic oligonucleotide"
cagaaagagugucucatcuua

SEQ ID NO: 4935 - RNA, 23 nt, Artificial Sequence
  source: /note="Description of Artificial Sequence: Synthetic oligonucleotide"
uaagaugagacacucuuucuggu

SEQ ID NO: 4936 - DNA, 21 bp, Artificial Sequence
  source: /note="Description of Artificial Sequence: Synthetic oligonucleotide"
  source: /note="Description of Combined DNA/RNA Molecule: Synthetic oligonucleotide"
cagaaagagugucucatcuua

SEQ ID NO: 4937 - DNA, 23 bp, Artificial Sequence
  source: /note="Description of Artificial Sequence: Synthetic oligonucleotide"
  source: /note="Description of Combined DNA/RNA Molecule: Synthetic oligonucleotide"
uaagatgagacactcuutcuggu

SEQ ID NO: 4938 - DNA, 21 bp, Artificial Sequence
  source: /note="Description of Artificial Sequence: Synthetic oligonucleotide"
  source: /note="Description of Combined DNA/RNA Molecule: Synthetic oligonucleotide"
cagaaagagugucucatcuua

SEQ ID NO: 4939 - DNA, 23 bp, Artificial Sequence
  source: /note="Description of Artificial Sequence: Synthetic oligonucleotide"
  source: /note="Description of Combined DNA/RNA Molecule: Synthetic oligonucleotide"
uaagatgagacactcuutcuggu

SEQ ID NO: 4940 - DNA, 21 bp, Artificial Sequence
  source: /note="Description of Artificial Sequence: Synthetic oligonucleotide"
  source: /note="Description of Combined DNA/RNA Molecule: Synthetic oligonucleotide"
cagaaagagugucucatcuua

SEQ ID NO: 4941 - DNA, 23 bp, Artificial Sequence
  source: /note="Description of Artificial Sequence: Synthetic oligonucleotide"
  source: /note="Description of Combined DNA/RNA Molecule: Synthetic oligonucleotide"
uaagatgagacactcuutcuggu

SEQ ID NO: 4942 - RNA, 21 nt, Artificial Sequence
  source: /note="Description of Artificial Sequence: Synthetic oligonucleotide"
cagaaagagugucucaucuua

SEQ ID NO: 4943 - RNA, 23 nt, Artificial Sequence
  source: /note="Description of Artificial Sequence: Synthetic oligonucleotide"
aagaagaugagacacucuuucug

SEQ ID NO: 4944 - DNA, 21 bp, Artificial Sequence
  source: /note="Description of Artificial Sequence: Synthetic oligonucleotide"
  source: /note="Description of Combined DNA/RNA Molecule: Synthetic oligonucleotide"
cagaaagagugucucatcuua

SEQ ID NO: 4945 - RNA, 23 nt, Artificial Sequence
  source: /note="Description of Artificial Sequence: Synthetic oligonucleotide"
aagaagaugagacacucuuucug

SEQ ID NO: 4946 - RNA, 21 nt, Artificial Sequence
  source: /note="Description of Artificial Sequence: Synthetic oligonucleotide"
cagaaagagugucucaucuua

SEQ ID NO: 4947 - RNA, 23 nt, Artificial Sequence
  source: /note="Description of Artificial Sequence: Synthetic oligonucleotide"
aagaagaugagacacucuuucug

SEQ ID NO: 4948 - RNA, 21 nt, Artificial Sequence
  source: /note="Description of Artificial Sequence: Synthetic oligonucleotide"
cagaaagagugucucaucuua

SEQ ID NO: 4949 - RNA, 23 nt, Artificial Sequence
  source: /note="Description of Artificial Sequence: Synthetic oligonucleotide"
aagaagaugagacacucuuucug

SEQ ID NO: 4950 - RNA, 21 nt, Artificial Sequence
  source: /note="Description of Artificial Sequence: Synthetic oligonucleotide"
cagaaagagugucucaucuua

SEQ ID NO: 4951 - RNA, 23 nt, Artificial Sequence
  source: /note="Description of Artificial Sequence: Synthetic oligonucleotide"
uaagaugagacacucuuucuggu

SEQ ID NO: 4952 - DNA, 21 bp, Artificial Sequence
  source: /note="Description of Artificial Sequence: Synthetic oligonucleotide"
  source: /note="Description of Combined DNA/RNA Molecule: Synthetic oligonucleotide"
cagaaagagtgucucaucuua

SEQ ID NO: 4953 - RNA, 23 nt, Artificial Sequence
  source: /note="Description of Artificial Sequence: Synthetic oligonucleotide"
uaagaugagacacucuuucuggu

SEQ ID NO: 4954 - RNA, 21 nt, Artificial Sequence
  source: /note="Description of Artificial Sequence: Synthetic oligonucleotide"
cagaaagagugucucaucuua

SEQ ID NO: 4955 - DNA, 23 bp, Artificial Sequence
  source: /note="Description of Artificial Sequence: Synthetic oligonucleotide"
  source: /note="Description of Combined DNA/RNA Molecule: Synthetic oligonucleotide"
uaagaugagacacuctuucuggu

SEQ ID NO: 4956 - DNA, 21 bp, Artificial Sequence
  source: /note="Description of Artificial Sequence: Synthetic oligonucleotide"
  source: /note="Description of Combined DNA/RNA Molecule: Synthetic oligonucleotide"
cagaaagagtgucucaucuua

SEQ ID NO: 4957 - DNA, 23 bp, Artificial Sequence
  source: /note="Description of Artificial Sequence: Synthetic oligonucleotide"
  source: /note="Description of Combined DNA/RNA Molecule: Synthetic oligonucleotide"
uaagaugagacacuctuucuggu

SEQ ID NO: 4958 - DNA, 21 bp, Artificial Sequence
  source: /note="Description of Artificial Sequence: Synthetic oligonucleotide"
  source: /note="Description of Combined DNA/RNA Molecule: Synthetic oligonucleotide"
cagaaagagtgucucaucuua

SEQ ID NO: 4959 - DNA, 23 bp, Artificial Sequence
  source: /note="Description of Artificial Sequence: Synthetic oligonucleotide"
  source: /note="Description of Combined DNA/RNA Molecule: Synthetic oligonucleotide"
uaagaugagacacuctuucuggu

SEQ ID NO: 4960 - DNA, 21 bp, Artificial Sequence
  source: /note="Description of Artificial Sequence: Synthetic oligonucleotide"
  source: /note="Description of Combined DNA/RNA Molecule: Synthetic oligonucleotide"
cagaaagagtgucucaucuua

SEQ ID NO: 4961 - DNA, 23 bp, Artificial Sequence
  source: /note="Description of Artificial Sequence: Synthetic oligonucleotide"
  source: /note="Description of Combined DNA/RNA Molecule: Synthetic oligonucleotide"
uaagaugagacacuctuucuggu

SEQ ID NO: 4962 - DNA, 21 bp, Artificial Sequence
  source: /note="Description of Artificial Sequence: Synthetic oligonucleotide"
  source: /note="Description of Combined DNA/RNA Molecule: Synthetic oligonucleotide"
cagaaagagugucucatcuua

SEQ ID NO: 4963 - RNA, 23 nt, Artificial Sequence
  source: /note="Description of Artificial Sequence: Synthetic oligonucleotide"
aagaagaugagacacucuuucug

SEQ ID NO: 4964 - DNA, 21 bp, Artificial Sequence
  source: /note="Description of Artificial Sequence: Synthetic oligonucleotide"
  source: /note="Description of Combined DNA/RNA Molecule: Synthetic oligonucleotide"
cagaaagagtgucucatcuua

SEQ ID NO: 4965 - RNA, 23 nt, Artificial Sequence
  source: /note="Description of Artificial Sequence: Synthetic oligonucleotide"
aagaagaugagacacucuuucug

SEQ ID NO: 4966 - DNA, 21 bp, Artificial Sequence
  source: /note="Description of Artificial Sequence: Synthetic oligonucleotide"
  source: /note="Description of Combined DNA/RNA Molecule: Synthetic oligonucleotide"
cagaaagagugucucatcuua

SEQ ID NO: 4967 - DNA, 23 bp, Artificial Sequence
  source: /note="Description of Artificial Sequence: Synthetic oligonucleotide"
  source: /note="Description of Combined DNA/RNA Molecule: Synthetic oligonucleotide"
uaagaugagacacuctuucuggu

SEQ ID NO: 4968 - DNA, 21 bp, Artificial Sequence
  source: /note="Description of Artificial Sequence: Synthetic oligonucleotide"
  source: /note="Description of Combined DNA/RNA Molecule: Synthetic oligonucleotide"
cagaaagagtgucucatcuua

SEQ ID NO: 4969 - DNA, 23 bp, Artificial Sequence
  source: /note="Description of Artificial Sequence: Synthetic oligonucleotide"
  source: /note="Description of Combined DNA/RNA Molecule: Synthetic oligonucleotide"
uaagaugagacacuctuucuggu

SEQ ID NO: 4970 - DNA, 21 bp, Artificial Sequence
  source: /note="Description of Artificial Sequence: Synthetic oligonucleotide"
  source: /note="Description of Combined DNA/RNA Molecule: Synthetic oligonucleotide"
cagaaagagtgucucatcuua

SEQ ID NO: 4971 - DNA, 23 bp, Artificial Sequence
  source: /note="Description of Artificial Sequence: Synthetic oligonucleotide"
  source: /note="Description of Combined DNA/RNA Molecule: Synthetic oligonucleotide"
uaagaugagacacuctuucuggu

SEQ ID NO: 4972 - DNA, 21 bp, Artificial Sequence
  source: /note="Description of Artificial Sequence: Synthetic oligonucleotide"
  source: /note="Description of Combined DNA/RNA Molecule: Synthetic oligonucleotide"
cagaaagagtgucucatcuua

SEQ ID NO: 4973 - DNA, 23 bp, Artificial Sequence
  source: /note="Description of Artificial Sequence: Synthetic oligonucleotide"
  source: /note="Description of Combined DNA/RNA Molecule: Synthetic oligonucleotide"
uaagaugagacacuctuucuggu

SEQ ID NO: 4974 - RNA, 21 nt, Artificial Sequence
  source: /note="Description of Artificial Sequence: Synthetic oligonucleotide"
cagaaagagugucucaucuua

SEQ ID NO: 4975 - RNA, 23 nt, Artificial Sequence
  source: /note="Description of Artificial Sequence: Synthetic oligonucleotide"
aagaagaugagacacucuuucug

SEQ ID NO: 4976 - DNA, 21 bp, Artificial Sequence
  source: /note="Description of Artificial Sequence: Synthetic oligonucleotide"
  source: /note="Description of Combined DNA/RNA Molecule: Synthetic oligonucleotide"
cagaaagagtgucucaucuua

SEQ ID NO: 4977 - RNA, 23 nt, Artificial Sequence
  source: /note="Description of Artificial Sequence: Synthetic oligonucleotide"
aagaagaugagacacucuuucug

SEQ ID NO: 4978 - RNA, 21 nt, Artificial Sequence
  source: /note="Description of Artificial Sequence: Synthetic oligonucleotide"
cagaaagagugucucaucuua

SEQ ID NO: 4979 - DNA, 23 bp, Artificial Sequence
  source: /note="Description of Artificial Sequence: Synthetic oligonucleotide"
  source: /note="Description of Combined DNA/RNA Molecule: Synthetic oligonucleotide"
uaagaugagacacuctuucuggu

SEQ ID NO: 4980 - DNA, 21 bp, Artificial Sequence
  source: /note="Description of Artificial Sequence: Synthetic oligonucleotide"
  source: /note="Description of Combined DNA/RNA Molecule: Synthetic oligonucleotide"
cagaaagagtgucucaucuua

SEQ ID NO: 4981 - DNA, 23 bp, Artificial Sequence
  source: /note="Description of Artificial Sequence: Synthetic oligonucleotide"
  source: /note="Description of Combined DNA/RNA Molecule: Synthetic oligonucleotide"
uaagaugagacacuctuucuggu

SEQ ID NO: 4982 - DNA, 21 bp, Artificial Sequence
  source: /note="Description of Artificial Sequence: Synthetic oligonucleotide"
  source: /note="Description of Combined DNA/RNA Molecule: Synthetic oligonucleotide"
cagaaagagtgucucaucuua

SEQ ID NO: 4983 - DNA, 23 bp, Artificial Sequence
  source: /note="Description of Artificial Sequence: Synthetic oligonucleotide"
  source: /note="Description of Combined DNA/RNA Molecule: Synthetic oligonucleotide"
uaagaugagacacuctuucuggu

SEQ ID NO: 4984 - DNA, 21 bp, Artificial Sequence
  source: /note="Description of Artificial Sequence: Synthetic oligonucleotide"
  source: /note="Description of Combined DNA/RNA Molecule: Synthetic oligonucleotide"
cagaaagagtgucucaucuua

SEQ ID NO: 4985 - DNA, 23 bp, Artificial Sequence
  source: /note="Description of Artificial Sequence: Synthetic oligonucleotide"
  source: /note="Description of Combined DNA/RNA Molecule: Synthetic oligonucleotide"
uaagaugagacacuctuucuggu

SEQ ID NO: 4986 - DNA, 21 bp, Artificial Sequence
  source: /note="Description of Artificial Sequence: Synthetic oligonucleotide"
  source: /note="Description of Combined DNA/RNA Molecule: Synthetic oligonucleotide"
cagaaagagtgucucaucuua

SEQ ID NO: 4987 - DNA, 23 bp, Artificial Sequence
  source: /note="Description of Artificial Sequence: Synthetic oligonucleotide"
  source: /note="Description of Combined DNA/RNA Molecule: Synthetic oligonucleotide"
uaagaugagacacuctuucuggu

SEQ ID NO: 4988 - DNA, 21 bp, Artificial Sequence
  source: /note="Description of Artificial Sequence: Synthetic oligonucleotide"
  source: /note="Description of Combined DNA/RNA Molecule: Synthetic oligonucleotide"
cagaaagagtgucucaucuua

SEQ ID NO: 4989 - DNA, 23 bp, Artificial Sequence
  source: /note="Description of Artificial Sequence: Synthetic oligonucleotide"
  source: /note="Description of Combined DNA/RNA Molecule: Synthetic oligonucleotide"
uaagaugagacacuctuucuggu

SEQ ID NO: 4990 - RNA, 21 nt, Artificial Sequence
  source: /note="Description of Artificial Sequence: Synthetic oligonucleotide"
cagaaagagugucucaucuua

SEQ ID NO: 4991 - RNA, 23 nt, Artificial Sequence
  source: /note="Description of Artificial Sequence: Synthetic oligonucleotide"
uaagaugagacacucuuucuggu

SEQ ID NO: 4992 - RNA, 21 nt, Artificial Sequence
  source: /note="Description of Artificial Sequence: Synthetic oligonucleotide"
cagaaagagugucucaucuua

SEQ ID NO: 4993 - RNA, 23 nt, Artificial Sequence
  source: /note="Description of Artificial Sequence: Synthetic oligonucleotide"
uaagaugagacacucuuucuggu

SEQ ID NO: 4994 - RNA, 21 nt, Artificial Sequence
  source: /note="Description of Artificial Sequence: Synthetic oligonucleotide"
cagaaagagugucucaucuua

SEQ ID NO: 4995 - DNA, 23 bp, Artificial Sequence
  source: /note="Description of Artificial Sequence: Synthetic oligonucleotide"
  source: /note="Description of Combined DNA/RNA Molecule: Synthetic oligonucleotide"
uaagatgagacactcuutcuggu

SEQ ID NO: 4996 - RNA, 21 nt, Artificial Sequence
  source: /note="Description of Artificial Sequence: Synthetic oligonucleotide"
cagaaagagugucucaucuua

SEQ ID NO: 4997 - RNA, 23 nt, Artificial Sequence
  source: /note="Description of Artificial Sequence: Synthetic oligonucleotide"
uaagaugagacacucuuucuggu

SEQ ID NO: 4998 - RNA, 21 nt, Artificial Sequence
  source: /note="Description of Artificial Sequence: Synthetic oligonucleotide"
cagaaagagugucucaucuua

SEQ ID NO: 4999 - DNA, 23 bp, Artificial Sequence
  source: /note="Description of Artificial Sequence: Synthetic oligonucleotide"
  source: /note="Description of Combined DNA/RNA Molecule: Synthetic oligonucleotide"
uaagatgagacactcuutcuggu

SEQ ID NO: 5000 - RNA, 21 nt, Artificial Sequence
  source: /note="Description of Artificial Sequence: Synthetic oligonucleotide"
cagaaagagugucucaucuua

SEQ ID NO: 5001 - RNA, 23 nt, Artificial Sequence
  source: /note="Description of Artificial Sequence: Synthetic oligonucleotide"
uaagaugagacacucuuucuggu

SEQ ID NO: 5002 - RNA, 21 nt, Artificial Sequence
  source: /note="Description of Artificial Sequence: Synthetic oligonucleotide"
cagaaagagugucucaucuua

SEQ ID NO: 5003 - RNA, 23 nt, Artificial Sequence
  source: /note="Description of Artificial Sequence: Synthetic oligonucleotide"
uaagaugagacacucuuucuggu

SEQ ID NO: 5004 - RNA, 21 nt, Artificial Sequence
  source: /note="Description of Artificial Sequence: Synthetic oligonucleotide"
cagaaagagugucucaucuua

SEQ ID NO: 5005 - RNA, 23 nt, Artificial Sequence
  source: /note="Description of Artificial Sequence: Synthetic oligonucleotide"
uaagaugagacacucuuucuggu

SEQ ID NO: 5006 - RNA, 21 nt, Artificial Sequence
  source: /note="Description of Artificial Sequence: Synthetic oligonucleotide"
cagaaagagugucucaucuua

SEQ ID NO: 5007 - RNA, 23 nt, Artificial Sequence
  source: /note="Description of Artificial Sequence: Synthetic oligonucleotide"
uaagaugagacacucuuucuggu

SEQ ID NO: 5008 - RNA, 21 nt, Artificial Sequence
  source: /note="Description of Artificial Sequence: Synthetic oligonucleotide"
cagaaagagugucucaucuua

SEQ ID NO: 5009 - RNA, 23 nt, Artificial Sequence
  source: /note="Description of Artificial Sequence: Synthetic oligonucleotide"
uaagaugagacacucuuucuggu

SEQ ID NO: 5010 - RNA, 21 nt, Artificial Sequence
  source: /note="Description of Artificial Sequence: Synthetic oligonucleotide"
cagaaagagugucucaucuua

SEQ ID NO: 5011 - RNA, 23 nt, Artificial Sequence
  source: /note="Description of Artificial Sequence: Synthetic oligonucleotide"
uaagaugagacacucuuucuggu

SEQ ID NO: 5012 - RNA, 21 nt, Artificial Sequence
  source: /note="Description of Artificial Sequence: Synthetic oligonucleotide"
cagaaagagugucucaucuua

SEQ ID NO: 5013 - RNA, 23 nt, Artificial Sequence
  source: /note="Description of Artificial Sequence: Synthetic oligonucleotide"
uaagaugagacacucuuucuggu

SEQ ID NO: 5014 - RNA, 21 nt, Artificial Sequence
  source: /note="Description of Artificial Sequence: Synthetic oligonucleotide"
cagaaagagugucucaucuua

SEQ ID NO: 5015 - DNA, 23 bp, Artificial Sequence
  source: /note="Description of Artificial Sequence: Synthetic oligonucleotide"
  source: /note="Description of Combined DNA/RNA Molecule: Synthetic oligonucleotide"
uaagatgagacactcuutcuggu

SEQ ID NO: 5016 - RNA, 21 nt, Artificial Sequence
  source: /note="Description of Artificial Sequence: Synthetic oligonucleotide"
cagaaagagugucucaucuua

SEQ ID NO: 5017 - DNA, 23 bp, Artificial Sequence
  source: /note="Description of Artificial Sequence: Synthetic oligonucleotide"
  source: /note="Description of Combined DNA/RNA Molecule: Synthetic oligonucleotide"
uaagatgagacactcuutcuggu

SEQ ID NO: 5018 - RNA, 21 nt, Artificial Sequence
  source: /note="Description of Artificial Sequence: Synthetic oligonucleotide"
cagaaagagugucucaucuua

SEQ ID NO: 5019 - DNA, 23 bp, Artificial Sequence
  source: /note="Description of Artificial Sequence: Synthetic oligonucleotide"
  source: /note="Description of Combined DNA/RNA Molecule: Synthetic oligonucleotide"
uaagatgagacactcuutcuggu

SEQ ID NO: 5020 - RNA, 21 nt, Artificial Sequence
  source: /note="Description of Artificial Sequence: Synthetic oligonucleotide"
cagaaagagugucucaucuua

SEQ ID NO: 5021 - RNA, 23 nt, Artificial Sequence
  source: /note="Description of Artificial Sequence: Synthetic oligonucleotide"
uaagaugagacacucuuucuggu

SEQ ID NO: 5022 - RNA, 21 nt, Artificial Sequence
  source: /note="Description of Artificial Sequence: Synthetic oligonucleotide"
cagaaagagugucucaucuua

SEQ ID NO: 5023 - RNA, 23 nt, Artificial Sequence
  source: /note="Description of Artificial Sequence: Synthetic oligonucleotide"
uaagaugagacacucuuucuggu

SEQ ID NO: 5024 - RNA, 21 nt, Artificial Sequence
  source: /note="Description of Artificial Sequence: Synthetic oligonucleotide"
cagaaagagugucucaucuua

SEQ ID NO: 5025 - RNA, 23 nt, Artificial Sequence
  source: /note="Description of Artificial Sequence: Synthetic oligonucleotide"
uaagaugagacacucuuucuggu

SEQ ID NO: 5026 - RNA, 21 nt, Artificial Sequence
  source: /note="Description of Artificial Sequence: Synthetic oligonucleotide"
cagaaagagugucucaucuua

SEQ ID NO: 5027 - DNA, 23 bp, Artificial Sequence
  source: /note="Description of Artificial Sequence: Synthetic oligonucleotide"
  source: /note="Description of Combined DNA/RNA Molecule: Synthetic oligonucleotide"
uaagatgagacactcuutcuggu

SEQ ID NO: 5028 - RNA, 21 nt, Artificial Sequence
  source: /note="Description of Artificial Sequence: Synthetic oligonucleotide"
cagaaagagugucucaucuua

SEQ ID NO: 5029 - DNA, 23 bp, Artificial Sequence
  source: /note="Description of Artificial Sequence: Synthetic oligonucleotide"
  source: /note="Description of Combined DNA/RNA Molecule: Synthetic oligonucleotide"
uaagatgagacactcuutcuggu

SEQ ID NO: 5030 - RNA, 21 nt, Artificial Sequence
  source: /note="Description of Artificial Sequence: Synthetic oligonucleotide"
cagaaagagugucucaucuua

SEQ ID NO: 5031 - DNA, 23 bp, Artificial Sequence
  source: /note="Description of Artificial Sequence: Synthetic oligonucleotide"
  source: /note="Description of Combined DNA/RNA Molecule: Synthetic oligonucleotide"
uaagatgagacactcuutcuggu

SEQ ID NO: 5032 - RNA, 21 nt, Artificial Sequence
  source: /note="Description of Artificial Sequence: Synthetic oligonucleotide"
cagaaagagugucucaucuua

SEQ ID NO: 5033 - RNA, 23 nt, Artificial Sequence
  source: /note="Description of Artificial Sequence: Synthetic oligonucleotide"
uaagaugagacacucuuucuggu

SEQ ID NO: 5034 - RNA, 21 nt, Artificial Sequence
  source: /note="Description of Artificial Sequence: Synthetic oligonucleotide"
cagaaagagugucucaucuua

SEQ ID NO: 5035 - RNA, 23 nt, Artificial Sequence
  source: /note="Description of Artificial Sequence: Synthetic oligonucleotide"
uaagaugagacacucuuucuggu

SEQ ID NO: 5036 - RNA, 21 nt, Artificial Sequence
  source: /note="Description of Artificial Sequence: Synthetic oligonucleotide"
cagaaagagugucucaucuua

SEQ ID NO: 5037 - RNA, 23 nt, Artificial Sequence
  source: /note="Description of Artificial Sequence: Synthetic oligonucleotide"
uaagaugagacacucuuucuggu

SEQ ID NO: 5038 - RNA, 21 nt, Artificial Sequence
  source: /note="Description of Artificial Sequence: Synthetic oligonucleotide"
cagaaagagugucucaucuua

SEQ ID NO: 5039 - DNA, 23 bp, Artificial Sequence
  source: /note="Description of Artificial Sequence: Synthetic oligonucleotide"
  source: /note="Description of Combined DNA/RNA Molecule: Synthetic oligonucleotide"
uaagatgagacactcuutcuggu

SEQ ID NO: 5040 - RNA, 21 nt, Artificial Sequence
  source: /note="Description of Artificial Sequence: Synthetic oligonucleotide"
cagaaagagugucucaucuua

SEQ ID NO: 5041 - DNA, 23 bp, Artificial Sequence
  source: /note="Description of Artificial Sequence: Synthetic oligonucleotide"
  source: /note="Description of Combined DNA/RNA Molecule: Synthetic oligonucleotide"
uaagatgagacactcuutcuggu

SEQ ID NO: 5042 - RNA, 21 nt, Artificial Sequence
  source: /note="Description of Artificial Sequence: Synthetic oligonucleotide"
cagaaagagugucucaucuua

SEQ ID NO: 5043 - RNA, 23 nt, Artificial Sequence
  source: /note="Description of Artificial Sequence: Synthetic oligonucleotide"
uaagaugagacacucuuucuggu

SEQ ID NO: 5044 - RNA, 21 nt, Artificial Sequence
  source: /note="Description of Artificial Sequence: Synthetic oligonucleotide"
cagaaagagugucucaucuua

SEQ ID NO: 5045 - RNA, 23 nt, Artificial Sequence
  source: /note="Description of Artificial Sequence: Synthetic oligonucleotide"
uaagaugagacacucuuucuggu

SEQ ID NO: 5046 - RNA, 21 nt, Artificial Sequence
  source: /note="Description of Artificial Sequence: Synthetic oligonucleotide"
cagaaagagugucucaucuua

SEQ ID NO: 5047 - RNA, 23 nt, Artificial Sequence
  source: /note="Description of Artificial Sequence: Synthetic oligonucleotide"
uaagaugagacacucuuucuggu

SEQ ID NO: 5048 - RNA, 21 nt, Artificial Sequence
  source: /note="Description of Artificial Sequence: Synthetic oligonucleotide"
cagaaagagugucucaucuua

SEQ ID NO: 5049 - DNA, 23 bp, Artificial Sequence
  source: /note="Description of Artificial Sequence: Synthetic oligonucleotide"
  source: /note="Description of Combined DNA/RNA Molecule: Synthetic oligonucleotide"
uaagatgagacactcuutcuggu

SEQ ID NO: 5050 - RNA, 21 nt, Artificial Sequence
  source: /note="Description of Artificial Sequence: Synthetic oligonucleotide"
cagaaagagugucucaucuua

SEQ ID NO: 5051 - DNA, 23 bp, Artificial Sequence
  source: /note="Description of Artificial Sequence: Synthetic oligonucleotide"
  source: /note="Description of Combined DNA/RNA Molecule: Synthetic oligonucleotide"
uaagatgagacactcuutcuggu

SEQ ID NO: 5052 - RNA, 21 nt, Artificial Sequence
  source: /note="Description of Artificial Sequence: Synthetic oligonucleotide"
cagaaagagugucucaucuua

SEQ ID NO: 5053 - DNA, 23 bp, Artificial Sequence
  source: /note="Description of Artificial Sequence: Synthetic oligonucleotide"
  source: /note="Description of Combined DNA/RNA Molecule: Synthetic oligonucleotide"
uaagatgagacactcuutcuggu

SEQ ID NO: 5054 - RNA, 21 nt, Artificial Sequence
  source: /note="Description of Artificial Sequence: Synthetic oligonucleotide"
cagaaagagugucucaucuua

SEQ ID NO: 5055 - DNA, 23 bp, Artificial Sequence
  source: /note="Description of Artificial Sequence: Synthetic oligonucleotide"
  source: /note="Description of Combined DNA/RNA Molecule: Synthetic oligonucleotide"
uaagatgagacactcuutcuggu

SEQ ID NO: 5056 - RNA, 21 nt, Artificial Sequence
  source: /note="Description of Artificial Sequence: Synthetic oligonucleotide"
cagaaagagugucucaucuua

SEQ ID NO: 5057 - RNA, 23 nt, Artificial Sequence
  source: /note="Description of Artificial Sequence: Synthetic oligonucleotide"
uaagaugagacacucuuucuggu

SEQ ID NO: 5058 - RNA, 21 nt, Artificial Sequence
  source: /note="Description of Artificial Sequence: Synthetic oligonucleotide"
cagaaagagugucucaucuua

SEQ ID NO: 5059 - RNA, 23 nt, Artificial Sequence
  source: /note="Description of Artificial Sequence: Synthetic oligonucleotide"
uaagaugagacacucuuucuggu

SEQ ID NO: 5060 - RNA, 21 nt, Artificial Sequence
  source: /note="Description of Artificial Sequence: Synthetic oligonucleotide"
cagaaagagugucucaucuua

SEQ ID NO: 5061 - RNA, 23 nt, Artificial Sequence
  source: /note="Description of Artificial Sequence: Synthetic oligonucleotide"
uaagaugagacacucuuucuggu

SEQ ID NO: 5062 - RNA, 21 nt, Artificial Sequence
  source: /note="Description of Artificial Sequence: Synthetic oligonucleotide"
cagaaagagugucucaucuua

SEQ ID NO: 5063 - DNA, 23 bp, Artificial Sequence
  source: /note="Description of Artificial Sequence: Synthetic oligonucleotide"
  source: /note="Description of Combined DNA/RNA Molecule: Synthetic oligonucleotide"
uaagatgagacactcuutcuggu

SEQ ID NO: 5064 - RNA, 21 nt, Artificial Sequence
  source: /note="Description of Artificial Sequence: Synthetic oligonucleotide"
cagaaagagugucucaucuua

SEQ ID NO: 5065 - DNA, 23 bp, Artificial Sequence
  source: /note="Description of Artificial Sequence: Synthetic oligonucleotide"
  source: /note="Description of Combined DNA/RNA Molecule: Synthetic oligonucleotide"
uaagatgagacactcuutcuggu

SEQ ID NO: 5066 - DNA, 21 bp, Artificial Sequence
  source: /note="Description of Artificial Sequence: Synthetic oligonucleotide"
  source: /note="Description of Combined DNA/RNA Molecule: Synthetic oligonucleotide"
cagaaagagugucucatcuua

SEQ ID NO: 5067 - RNA, 23 nt, Artificial Sequence
  source: /note="Description of Artificial Sequence: Synthetic oligonucleotide"
uaagaugagacacucuuucuggu

SEQ ID NO: 5068 - DNA, 21 bp, Artificial Sequence
  source: /note="Description of Artificial Sequence: Synthetic oligonucleotide"
  source: /note="Description of Combined DNA/RNA Molecule: Synthetic oligonucleotide"
cagaaagagugucucatcuua

SEQ ID NO: 5069 - RNA, 23 nt, Artificial Sequence
  source: /note="Description of Artificial Sequence: Synthetic oligonucleotide"
uaagaugagacacucuuucuggu

SEQ ID NO: 5070 - DNA, 21 bp, Artificial Sequence
  source: /note="Description of Artificial Sequence: Synthetic oligonucleotide"
  source: /note="Description of Combined DNA/RNA Molecule: Synthetic oligonucleotide"
cagaaagagugucucatcuua

SEQ ID NO: 5071 - RNA, 23 nt, Artificial Sequence
  source: /note="Description of Artificial Sequence: Synthetic oligonucleotide"
uaagaugagacacucuuucuggu

SEQ ID NO: 5072 - DNA, 21 bp, Artificial Sequence
  source: /note="Description of Artificial Sequence: Synthetic oligonucleotide"
  source: /note="Description of Combined DNA/RNA Molecule: Synthetic oligonucleotide"
cagaaagagugucucatcuua

SEQ ID NO: 5073 - DNA, 23 bp, Artificial Sequence
  source: /note="Description of Artificial Sequence: Synthetic oligonucleotide"
  source: /note="Description of Combined DNA/RNA Molecule: Synthetic oligonucleotide"
uaagatgagacactcuutcuggu

SEQ ID NO: 5074 - DNA, 21 bp, Artificial Sequence
  source: /note="Description of Artificial Sequence: Synthetic oligonucleotide"
  source: /note="Description of Combined DNA/RNA Molecule: Synthetic oligonucleotide"
cagaaagagugucucatcuua

SEQ ID NO: 5075 - DNA, 23 bp, Artificial Sequence
  source: /note="Description of Artificial Sequence: Synthetic oligonucleotide"
  source: /note="Description of Combined DNA/RNA Molecule: Synthetic oligonucleotide"
uaagatgagacactcuutcuggu

SEQ ID NO: 5076 - DNA, 21 bp, Artificial Sequence
  source: /note="Description of Artificial Sequence: Synthetic oligonucleotide"
  source: /note="Description of Combined DNA/RNA Molecule: Synthetic oligonucleotide"
cagaaagagugucucatcuua

SEQ ID NO: 5077 - DNA, 23 bp, Artificial Sequence
  source: /note="Description of Artificial Sequence: Synthetic oligonucleotide"
  source: /note="Description of Combined DNA/RNA Molecule: Synthetic oligonucleotide"
uaagatgagacactcuutcuggu

SEQ ID NO: 5078 - RNA, 21 nt, Artificial Sequence
  source: /note="Description of Artificial Sequence: Synthetic oligonucleotide"
cagaaagagugucucaucuua

SEQ ID NO: 5079 - RNA, 23 nt, Artificial Sequence
  source: /note="Description of Artificial Sequence: Synthetic oligonucleotide"
uaagaugagacacucuuucuggu

SEQ ID NO: 5080 - DNA, 21 bp, Artificial Sequence
  source: /note="Description of Artificial Sequence: Synthetic oligonucleotide"
  source: /note="Description of Combined DNA/RNA Molecule: Synthetic oligonucleotide"
cagaaagagugucucatcuua

SEQ ID NO: 5081 - RNA, 23 nt, Artificial Sequence
  source: /note="Description of Artificial Sequence: Synthetic oligonucleotide"
uaagaugagacacucuuucuggu

SEQ ID NO: 5082 - RNA, 21 nt, Artificial Sequence
  source: /note="Description of Artificial Sequence: Synthetic oligonucleotide"
cagaaagagugucucaucuua

SEQ ID NO: 5083 - RNA, 23 nt, Artificial Sequence
  source: /note="Description of Artificial Sequence: Synthetic oligonucleotide"
uaagaugagacacucuuucuggu

SEQ ID NO: 5084 - RNA, 21 nt, Artificial Sequence
  source: /note="Description of Artificial Sequence: Synthetic oligonucleotide"
cagaaagagugucucaucuua

SEQ ID NO: 5085 - RNA, 23 nt, Artificial Sequence
  source: /note="Description of Artificial Sequence: Synthetic oligonucleotide"
uaagaugagacacucuuucuggu

SEQ ID NO: 5086 - RNA, 21 nt, Artificial Sequence
  source: /note="Description of Artificial Sequence: Synthetic oligonucleotide"
cagaaagagugucucaucuua

SEQ ID NO: 5087 - RNA, 23 nt, Artificial Sequence
  source: /note="Description of Artificial Sequence: Synthetic oligonucleotide"
uaagaugagacacucuuucuggu

SEQ ID NO: 5088 - DNA, 21 bp, Artificial Sequence
  source: /note="Description of Artificial Sequence: Synthetic oligonucleotide"
  source: /note="Description of Combined DNA/RNA Molecule: Synthetic oligonucleotide"
cagaaagagtgucucaucuua

SEQ ID NO: 5089 - RNA, 23 nt, Artificial Sequence
  source: /note="Description of Artificial Sequence: Synthetic oligonucleotide"
uaagaugagacacucuuucuggu

SEQ ID NO: 5090 - RNA, 21 nt, Artificial Sequence
  source: /note="Description of Artificial Sequence: Synthetic oligonucleotide"
cagaaagagugucucaucuua

SEQ ID NO: 5091 - DNA, 23 bp, Artificial Sequence
  source: /note="Description of Artificial Sequence: Synthetic oligonucleotide"
  source: /note="Description of Combined DNA/RNA Molecule: Synthetic oligonucleotide"
uaagaugagacacuctuucuggu

SEQ ID NO: 5092 - DNA, 21 bp, Artificial Sequence
  source: /note="Description of Artificial Sequence: Synthetic oligonucleotide"
  source: /note="Description of Combined DNA/RNA Molecule: Synthetic oligonucleotide"
cagaaagagtgucucaucuua

SEQ ID NO: 5093 - DNA, 23 bp, Artificial Sequence
  source: /note="Description of Artificial Sequence: Synthetic oligonucleotide"
  source: /note="Description of Combined DNA/RNA Molecule: Synthetic oligonucleotide"
uaagaugagacacuctuucuggu

SEQ ID NO: 5094 - DNA, 21 bp, Artificial Sequence
  source: /note="Description of Artificial Sequence: Synthetic oligonucleotide"
  source: /note="Description of Combined DNA/RNA Molecule: Synthetic oligonucleotide"
cagaaagagtgucucaucuua

SEQ ID NO: 5095 - DNA, 23 bp, Artificial Sequence
  source: /note="Description of Artificial Sequence: Synthetic oligonucleotide"
  source: /note="Description of Combined DNA/RNA Molecule: Synthetic oligonucleotide"
uaagaugagacacuctuucuggu

SEQ ID NO: 5096 - DNA, 21 bp, Artificial Sequence
  source: /note="Description of Artificial Sequence: Synthetic oligonucleotide"
  source: /note="Description of Combined DNA/RNA Molecule: Synthetic oligonucleotide"
cagaaagagtgucucaucuua

SEQ ID NO: 5097 - DNA, 23 bp, Artificial Sequence
  source: /note="Description of Artificial Sequence: Synthetic oligonucleotide"
  source: /note="Description of Combined DNA/RNA Molecule: Synthetic oligonucleotide"
uaagaugagacacuctuucuggu

SEQ ID NO: 5098 - DNA, 21 bp, Artificial Sequence
  source: /note="Description of Artificial Sequence: Synthetic oligonucleotide"
  source: /note="Description of Combined DNA/RNA Molecule: Synthetic oligonucleotide"
cagaaagagugucucatcuua

SEQ ID NO: 5099 - RNA, 23 nt, Artificial Sequence
  source: /note="Description of Artificial Sequence: Synthetic oligonucleotide"
aagaagaugagacacucuuucug

SEQ ID NO: 5100 - DNA, 21 bp, Artificial Sequence
  source: /note="Description of Artificial Sequence: Synthetic oligonucleotide"
  source: /note="Description of Combined DNA/RNA Molecule: Synthetic oligonucleotide"
cagaaagagtgucucatcuua

SEQ ID NO: 5101 - RNA, 23 nt, Artificial Sequence
  source: /note="Description of Artificial Sequence: Synthetic oligonucleotide"
aagaagaugagacacucuuucug

SEQ ID NO: 5102 - DNA, 21 bp, Artificial Sequence
  source: /note="Description of Artificial Sequence: Synthetic oligonucleotide"
  source: /note="Description of Combined DNA/RNA Molecule: Synthetic oligonucleotide"
cagaaagagugucucatcuua

SEQ ID NO: 5103 - DNA, 23 bp, Artificial Sequence
  source: /note="Description of Artificial Sequence: Synthetic oligonucleotide"
  source: /note="Description of Combined DNA/RNA Molecule: Synthetic oligonucleotide"
uaagaugagacacuctuucuggu

SEQ ID NO: 5104 - DNA, 21 bp, Artificial Sequence
  source: /note="Description of Artificial Sequence: Synthetic oligonucleotide"
  source: /note="Description of Combined DNA/RNA Molecule: Synthetic oligonucleotide"
cagaaagagtgucucatcuua

SEQ ID NO: 5105 - DNA, 23 bp, Artificial Sequence
  source: /note="Description of Artificial Sequence: Synthetic oligonucleotide"
  source: /note="Description of Combined DNA/RNA Molecule: Synthetic oligonucleotide"
uaagaugagacacuctuucuggu

SEQ ID NO: 5106 - DNA, 21 bp, Artificial Sequence
  source: /note="Description of Artificial Sequence: Synthetic oligonucleotide"
  source: /note="Description of Combined DNA/RNA Molecule: Synthetic oligonucleotide"
cagaaagagtgucucatcuua

SEQ ID NO: 5107 - DNA, 23 bp, Artificial Sequence
  source: /note="Description of Artificial Sequence: Synthetic oligonucleotide"
  source: /note="Description of Combined DNA/RNA Molecule: Synthetic oligonucleotide"
uaagaugagacacuctuucuggu

SEQ ID NO: 5108 - DNA, 21 bp, Artificial Sequence
  source: /note="Description of Artificial Sequence: Synthetic oligonucleotide"
  source: /note="Description of Combined DNA/RNA Molecule: Synthetic oligonucleotide"
cagaaagagtgucucatcuua

SEQ ID NO: 5109 - DNA, 23 bp, Artificial Sequence
  source: /note="Description of Artificial Sequence: Synthetic oligonucleotide"
  source: /note="Description of Combined DNA/RNA Molecule: Synthetic oligonucleotide"
uaagaugagacacuctuucuggu

SEQ ID NO: 5110 - RNA, 21 nt, Artificial Sequence
  source: /note="Description of Artificial Sequence: Synthetic oligonucleotide"
cagaaagagugucucaucuua

SEQ ID NO: 5111 - RNA, 23 nt, Artificial Sequence
  source: /note="Description of Artificial Sequence: Synthetic oligonucleotide"
aagaagaugagacacucuuucug

SEQ ID NO: 5112 - DNA, 21 bp, Artificial Sequence
  source: /note="Description of Artificial Sequence: Synthetic oligonucleotide"
  source: /note="Description of Combined DNA/RNA Molecule: Synthetic oligonucleotide"
cagaaagagtgucucaucuua

SEQ ID NO: 5113 - RNA, 23 nt, Artificial Sequence
  source: /note="Description of Artificial Sequence: Synthetic oligonucleotide"
aagaagaugagacacucuuucug

SEQ ID NO: 5114 - RNA, 21 nt, Artificial Sequence
  source: /note="Description of Artificial Sequence: Synthetic oligonucleotide"
cagaaagagugucucaucuua

SEQ ID NO: 5115 - DNA, 23 bp, Artificial Sequence
  source: /note="Description of Artificial Sequence: Synthetic oligonucleotide"
  source: /note="Description of Combined DNA/RNA Molecule: Synthetic oligonucleotide"
uaagaugagacacuctuucuggu

SEQ ID NO: 5116 - DNA, 21 bp, Artificial Sequence
  source: /note="Description of Artificial Sequence: Synthetic oligonucleotide"
  source: /note="Description of Combined DNA/RNA Molecule: Synthetic oligonucleotide"
cagaaagagtgucucaucuua

SEQ ID NO: 5117 - DNA, 23 bp, Artificial Sequence
  source: /note="Description of Artificial Sequence: Synthetic oligonucleotide"
  source: /note="Description of Combined DNA/RNA Molecule: Synthetic oligonucleotide"
uaagaugagacacuctuucuggu

SEQ ID NO: 5118 - DNA, 21 bp, Artificial Sequence
  source: /note="Description of Artificial Sequence: Synthetic oligonucleotide"
  source: /note="Description of Combined DNA/RNA Molecule: Synthetic oligonucleotide"
cagaaagagtgucucaucuua

SEQ ID NO: 5119 - DNA, 23 bp, Artificial Sequence
  source: /note="Description of Artificial Sequence: Synthetic oligonucleotide"
  source: /note="Description of Combined DNA/RNA Molecule: Synthetic oligonucleotide"
uaagaugagacacuctuucuggu

SEQ ID NO: 5120 - DNA, 21 bp, Artificial Sequence
  source: /note="Description of Artificial Sequence: Synthetic oligonucleotide"
  source: /note="Description of Combined DNA/RNA Molecule: Synthetic oligonucleotide"
cagaaagagtgucucaucuua

SEQ ID NO: 5121 - DNA, 23 bp, Artificial Sequence
  source: /note="Description of Artificial Sequence: Synthetic oligonucleotide"
  source: /note="Description of Combined DNA/RNA Molecule: Synthetic oligonucleotide"
uaagaugagacacuctuucuggu

SEQ ID NO: 5122 - DNA, 21 bp, Artificial Sequence
  source: /note="Description of Artificial Sequence: Synthetic oligonucleotide"
  source: /note="Description of Combined DNA/RNA Molecule: Synthetic oligonucleotide"
cagaaagagtgucucaucuua

SEQ ID NO: 5123 - DNA, 23 bp, Artificial Sequence
  source: /note="Description of Artificial Sequence: Synthetic oligonucleotide"
  source: /note="Description of Combined DNA/RNA Molecule: Synthetic oligonucleotide"
uaagaugagacacuctuucuggu

SEQ ID NO: 5124 - DNA, 21 bp, Artificial Sequence
  source: /note="Description of Artificial Sequence: Synthetic oligonucleotide"
  source: /note="Description of Combined DNA/RNA Molecule: Synthetic oligonucleotide"
cagaaagagtgucucaucuua

SEQ ID NO: 5125 - DNA, 23 bp, Artificial Sequence
  source: /note="Description of Artificial Sequence: Synthetic oligonucleotide"
  source: /note="Description of Combined DNA/RNA Molecule: Synthetic oligonucleotide"
uaagaugagacacuctuucuggu

SEQ ID NO: 5126 - RNA, 21 nt, Artificial Sequence
  source: /note="Description of Artificial Sequence: Synthetic oligonucleotide"
cagaaagagugucucaucuua

SEQ ID NO: 5127 - RNA, 23 nt, Artificial Sequence
  source: /note="Description of Artificial Sequence: Synthetic oligonucleotide"
uaagaugagacacucuuucuggu

SEQ ID NO: 5128 - RNA, 21 nt, Artificial Sequence
  source: /note="Description of Artificial Sequence: Synthetic oligonucleotide"
cagaaagagugucucaucuua

SEQ ID NO: 5129 - RNA, 23 nt, Artificial Sequence
  source: /note="Description of Artificial Sequence: Synthetic oligonucleotide"
uaagaugagacacucuuucuggu

SEQ ID NO: 5130 - RNA, 21 nt, Artificial Sequence
  source: /note="Description of Artificial Sequence: Synthetic oligonucleotide"
cagaaagagugucucaucuua

SEQ ID NO: 5131 - RNA, 23 nt, Artificial Sequence
  source: /note="Description of Artificial Sequence: Synthetic oligonucleotide"
uaagaugagacacucuuucuggu

SEQ ID NO: 5132 - RNA, 21 nt, Artificial Sequence
  source: /note="Description of Artificial Sequence: Synthetic oligonucleotide"
cagaaagagugucucaucuua

SEQ ID NO: 5133 - RNA, 23 nt, Artificial Sequence
  source: /note="Description of Artificial Sequence: Synthetic oligonucleotide"
uaagaugagacacucuuucuggu

SEQ ID NO: 5134 - RNA, 21 nt, Artificial Sequence
  source: /note="Description of Artificial Sequence: Synthetic oligonucleotide"
cagaaagagugucucaucuua

SEQ ID NO: 5135 - RNA, 23 nt, Artificial Sequence
  source: /note="Description of Artificial Sequence: Synthetic oligonucleotide"
uaagaugagacacucuuucuggu

SEQ ID NO: 5136 - RNA, 21 nt, Artificial Sequence
  source: /note="Description of Artificial Sequence: Synthetic oligonucleotide"
cagaaagagugucucaucuua

SEQ ID NO: 5137 - DNA, 23 bp, Artificial Sequence
  source: /note="Description of Artificial Sequence: Synthetic oligonucleotide"
  source: /note="Description of Combined DNA/RNA Molecule: Synthetic oligonucleotide"
uaagatgagacactcuutcuggu

SEQ ID NO: 5138 - RNA, 21 nt, Artificial Sequence
  source: /note="Description of Artificial Sequence: Synthetic oligonucleotide"
cagaaagagugucucaucuua

SEQ ID NO: 5139 - RNA, 23 nt, Artificial Sequence
  source: /note="Description of Artificial Sequence: Synthetic oligonucleotide"
uaagaugagacacucuuucuggu

SEQ ID NO: 5140 - RNA, 21 nt, Artificial Sequence
  source: /note="Description of Artificial Sequence: Synthetic oligonucleotide"
cagaaagagugucucaucuua

SEQ ID NO: 5141 - DNA, 23 bp, Artificial Sequence
  source: /note="Description of Artificial Sequence: Synthetic oligonucleotide"
  source: /note="Description of Combined DNA/RNA Molecule: Synthetic oligonucleotide"
uaagatgagacactcuutcuggu

SEQ ID NO: 5142 - RNA, 21 nt, Artificial Sequence
  source: /note="Description of Artificial Sequence: Synthetic oligonucleotide"
cagaaagagugucucaucuua

SEQ ID NO: 5143 - RNA, 23 nt, Artificial Sequence
  source: /note="Description of Artificial Sequence: Synthetic oligonucleotide"
uaagaugagacacucuuucuggu

SEQ ID NO: 5144 - DNA, 21 bp, Artificial Sequence
  source: /note="Description of Artificial Sequence: Synthetic oligonucleotide"
  source: /note="Description of Combined DNA/RNA Molecule: Synthetic oligonucleotide"
cagaaagagtgucucaucuua

SEQ ID NO: 5145 - DNA, 23 bp, Artificial Sequence
  source: /note="Description of Artificial Sequence: Synthetic oligonucleotide"
  source: /note="Description of Combined DNA/RNA Molecule: Synthetic oligonucleotide"
uaagaugagacacuctuucuggu

SEQ ID NO: 5146 - DNA, 21 bp, Artificial Sequence
  source: /note="Description of Artificial Sequence: Synthetic oligonucleotide"
  source: /note="Description of Combined DNA/RNA Molecule: Synthetic oligonucleotide"
cagaaagagtgucucaucuua

SEQ ID NO: 5147 - RNA, 23 nt, Artificial Sequence
  source: /note="Description of Artificial Sequence: Synthetic oligonucleotide"
uaagaugagacacucuuucuggu

SEQ ID NO: 5148 - DNA, 21 bp, Artificial Sequence
  source: /note="Description of Artificial Sequence: Synthetic oligonucleotide"
  source: /note="Description of Combined DNA/RNA Molecule: Synthetic oligonucleotide"
cagaaagagtgucucaucuua

SEQ ID NO: 5149 - RNA, 23 nt, Artificial Sequence
  source: /note="Description of Artificial Sequence: Synthetic oligonucleotide"
uaagaugagacacucuuucuggu

SEQ ID NO: 5150 - DNA, 21 bp, Artificial Sequence
  source: /note="Description of Artificial Sequence: Synthetic oligonucleotide"
  source: /note="Description of Combined DNA/RNA Molecule: Synthetic oligonucleotide"
cagaaagagugucucatcuua

SEQ ID NO: 5151 - DNA, 23 bp, Artificial Sequence
  source: /note="Description of Artificial Sequence: Synthetic oligonucleotide"
  source: /note="Description of Combined DNA/RNA Molecule: Synthetic oligonucleotide"
uaagatgagacactcuutcuggu

SEQ ID NO: 5152 - DNA, 21 bp, Artificial Sequence
  source: /note="Description of Artificial Sequence: Synthetic oligonucleotide"
  source: /note="Description of Combined DNA/RNA Molecule: Synthetic oligonucleotide"
cagaaagagugucucatcuua

SEQ ID NO: 5153 - DNA, 23 bp, Artificial Sequence
  source: /note="Description of Artificial Sequence: Synthetic oligonucleotide"
  source: /note="Description of Combined DNA/RNA Molecule: Synthetic oligonucleotide"
uaagatgagacactcuutcuggu

SEQ ID NO: 5154 - RNA, 21 nt, Artificial Sequence
  source: /note="Description of Artificial Sequence: Synthetic oligonucleotide"
cagaaagagugucucaucuua

SEQ ID NO: 5155 - DNA, 23 bp, Artificial Sequence
  source: /note="Description of Artificial Sequence: Synthetic oligonucleotide"
  source: /note="Description of Combined DNA/RNA Molecule: Synthetic oligonucleotide"
uaagatgagacactcuutcuggu

SEQ ID NO: 5156 - DNA, 21 bp, Artificial Sequence
  source: /note="Description of Artificial Sequence: Synthetic oligonucleotide"
  source: /note="Description of Combined DNA/RNA Molecule: Synthetic oligonucleotide"
cagaaagagugucucatcuua

SEQ ID NO: 5157 - RNA, 23 nt, Artificial Sequence
  source: /note="Description of Artificial Sequence: Synthetic oligonucleotide"
uaagaugagacacucuuucuggu

SEQ ID NO: 5158 - RNA, 21 nt, Artificial Sequence
  source: /note="Description of Artificial Sequence: Synthetic oligonucleotide"
cagaaagagugucucaucuua

SEQ ID NO: 5159 - DNA, 23 bp, Artificial Sequence
  source: /note="Description of Artificial Sequence: Synthetic oligonucleotide"
  source: /note="Description of Combined DNA/RNA Molecule: Synthetic oligonucleotide"
uaagatgagacactcuutcuggu

SEQ ID NO: 5160 - RNA, 21 nt, Artificial Sequence
  source: /note="Description of Artificial Sequence: Synthetic oligonucleotide"
cagaaagagugucucaucuua

SEQ ID NO: 5161 - DNA, 23 bp, Artificial Sequence
  source: /note="Description of Artificial Sequence: Synthetic oligonucleotide"
  source: /note="Description of Combined DNA/RNA Molecule: Synthetic oligonucleotide"
uaagaugagacacuctuucuggu

SEQ ID NO: 5162 - RNA, 21 nt, Artificial Sequence
  source: /note="Description of Artificial Sequence: Synthetic oligonucleotide"
cagaaagagugucucaucuua

SEQ ID NO: 5163 - RNA, 23 nt, Artificial Sequence
  source: /note="Description of Artificial Sequence: Synthetic oligonucleotide"
uaagaugagacacucuuucuggu

SEQ ID NO: 5164 - RNA, 21 nt, Artificial Sequence
  source: /note="Description of Artificial Sequence: Synthetic oligonucleotide"
gaaagagugucucaucuucuu

SEQ ID NO: 5165 - RNA, 23 nt, Artificial Sequence
  source: /note="Description of Artificial Sequence: Synthetic oligonucleotide"
aagaagaugagacacucuuucug

SEQ ID NO: 5166 - DNA, 21 bp, Artificial Sequence
  source: /note="Description of Artificial Sequence: Synthetic oligonucleotide"
  source: /note="Description of Combined DNA/RNA Molecule: Synthetic oligonucleotide"
gaaagagugucucauctucuu

SEQ ID NO: 5167 - RNA, 23 nt, Artificial Sequence
  source: /note="Description of Artificial Sequence: Synthetic oligonucleotide"
aagaagaugagacacucuuucug

SEQ ID NO: 5168 - DNA, 21 bp, Artificial Sequence
  source: /note="Description of Artificial Sequence: Synthetic oligonucleotide"
  source: /note="Description of Combined DNA/RNA Molecule: Synthetic oligonucleotide"
gaaagagugtcucaucuucuu

SEQ ID NO: 5169 - RNA, 23 nt, Artificial Sequence
  source: /note="Description of Artificial Sequence: Synthetic oligonucleotide"
aagaagaugagacacucuuucug

SEQ ID NO: 5170 - DNA, 21 bp, Artificial Sequence
  source: /note="Description of Artificial Sequence: Synthetic oligonucleotide"
  source: /note="Description of Combined DNA/RNA Molecule: Synthetic oligonucleotide"
gaaagagugucucauctucuu

SEQ ID NO: 5171 - RNA, 23 nt, Artificial Sequence
  source: /note="Description of Artificial Sequence: Synthetic oligonucleotide"
aagaagaugagacacucuuucug

SEQ ID NO: 5172 - RNA, 21 nt, Artificial Sequence
  source: /note="Description of Artificial Sequence: Synthetic oligonucleotide"
gaaagagugucucaucuucuu

SEQ ID NO: 5173 - RNA, 23 nt, Artificial Sequence
  source: /note="Description of Artificial Sequence: Synthetic oligonucleotide"
aagaagaugagacacucuuucug

SEQ ID NO: 5174 - RNA, 21 nt, Artificial Sequence
  source: /note="Description of Artificial Sequence: Synthetic oligonucleotide"
cagaaagagugucucaucuua

SEQ ID NO: 5175 - RNA, 23 nt, Artificial Sequence
  source: /note="Description of Artificial Sequence: Synthetic oligonucleotide"
uaagaugagacacucuuucuggu

SEQ ID NO: 5176 - RNA, 21 nt, Artificial Sequence
  source: /note="Description of Artificial Sequence: Synthetic oligonucleotide"
cagaaagagugucucaucuua

SEQ ID NO: 5177 - RNA, 23 nt, Artificial Sequence
  source: /note="Description of Artificial Sequence: Synthetic oligonucleotide"
uaagaugagacacucuuucuggu

SEQ ID NO: 5178 - RNA, 21 nt, Artificial Sequence
  source: /note="Description of Artificial Sequence: Synthetic oligonucleotide"
cagaaagagugucucaucuua

SEQ ID NO: 5179 - RNA, 23 nt, Artificial Sequence
  source: /note="Description of Artificial Sequence: Synthetic oligonucleotide"
uaagaugagacacucuuucuggu

SEQ ID NO: 5180 - DNA, 21 bp, Artificial Sequence
  source: /note="Description of Artificial Sequence: Synthetic oligonucleotide"
  source: /note="Description of Combined DNA/RNA Molecule: Synthetic oligonucleotide"
gaaagagugucucauctucuu

SEQ ID NO: 5181 - RNA, 23 nt, Artificial Sequence
  source: /note="Description of Artificial Sequence: Synthetic oligonucleotide"
aagaagaugagacacucuuucug

SEQ ID NO: 5182 - DNA, 21 bp, Artificial Sequence
  source: /note="Description of Artificial Sequence: Synthetic oligonucleotide"
  source: /note="Description of Combined DNA/RNA Molecule: Synthetic oligonucleotide"
gaaagagugucucauctucuu

SEQ ID NO: 5183 - RNA, 23 nt, Artificial Sequence
  source: /note="Description of Artificial Sequence: Synthetic oligonucleotide"
aagaagaugagacacucuuucug

SEQ ID NO: 5184 - DNA, 21 bp, Artificial Sequence
  source: /note="Description of Artificial Sequence: Synthetic oligonucleotide"
  source: /note="Description of Combined DNA/RNA Molecule: Synthetic oligonucleotide"
gaaagagugucucauctucuu

SEQ ID NO: 5185 - RNA, 23 nt, Artificial Sequence
  source: /note="Description of Artificial Sequence: Synthetic oligonucleotide"
aagaagaugagacacucuuucug

SEQ ID NO: 5186 - DNA, 21 bp, Artificial Sequence
  source: /note="Description of Artificial Sequence: Synthetic oligonucleotide"
  source: /note="Description of Combined DNA/RNA Molecule: Synthetic oligonucleotide"
gaaagagugtcucaucuucuu

SEQ ID NO: 5187 - RNA, 23 nt, Artificial Sequence
  source: /note="Description of Artificial Sequence: Synthetic oligonucleotide"
aagaagaugagacacucuuucug

SEQ ID NO: 5188 - DNA, 21 bp, Artificial Sequence
  source: /note="Description of Artificial Sequence: Synthetic oligonucleotide"
  source: /note="Description of Combined DNA/RNA Molecule: Synthetic oligonucleotide"
gaaagagugtcucaucuucuu

SEQ ID NO: 5189 - RNA, 23 nt, Artificial Sequence
  source: /note="Description of Artificial Sequence: Synthetic oligonucleotide"
aagaagaugagacacucuuucug

SEQ ID NO: 5190 - DNA, 21 bp, Artificial Sequence
  source: /note="Description of Artificial Sequence: Synthetic oligonucleotide"
  source: /note="Description of Combined DNA/RNA Molecule: Synthetic oligonucleotide"
gaaagagugtcucaucuucuu

SEQ ID NO: 5191 - RNA, 23 nt, Artificial Sequence
  source: /note="Description of Artificial Sequence: Synthetic oligonucleotide"
aagaagaugagacacucuuucug

SEQ ID NO: 5192 - RNA, 21 nt, Artificial Sequence
  source: /note="Description of Artificial Sequence: Synthetic oligonucleotide"
gaaagagugucucaucuucuu

SEQ ID NO: 5193 - RNA, 23 nt, Artificial Sequence
  source: /note="Description of Artificial Sequence: Synthetic oligonucleotide"
aagaagaugagacacucuuucug

SEQ ID NO: 5194 - RNA, 21 nt, Artificial Sequence
  source: /note="Description of Artificial Sequence: Synthetic oligonucleotide"
gaaagagugucucaucuucuu

SEQ ID NO: 5195 - RNA, 23 nt, Artificial Sequence
  source: /note="Description of Artificial Sequence: Synthetic oligonucleotide"
aagaagaugagacacucuuucug

SEQ ID NO: 5196 - RNA, 21 nt, Artificial Sequence
  source: /note="Description of Artificial Sequence: Synthetic oligonucleotide"
gaaagagugucucaucuucuu

SEQ ID NO: 5197 - RNA, 23 nt, Artificial Sequence
  source: /note="Description of Artificial Sequence: Synthetic oligonucleotide"
aagaagaugagacacucuuucug

SEQ ID NO: 5198 - DNA, 21 bp, Artificial Sequence
  source: /note="Description of Artificial Sequence: Synthetic oligonucleotide"
  source: /note="Description of Combined DNA/RNA Molecule: Synthetic oligonucleotide"
gaaagagugtcucauctucuu

SEQ ID NO: 5199 - RNA, 23 nt, Artificial Sequence
  source: /note="Description of Artificial Sequence: Synthetic oligonucleotide"
aagaagaugagacacucuuucug

SEQ ID NO: 5200 - DNA, 21 bp, Artificial Sequence
  source: /note="Description of Artificial Sequence: Synthetic oligonucleotide"
  source: /note="Description of Combined DNA/RNA Molecule: Synthetic oligonucleotide"
gaaagagugtcucauctucuu

SEQ ID NO: 5201 - RNA, 23 nt, Artificial Sequence
  source: /note="Description of Artificial Sequence: Synthetic oligonucleotide"
aagaagaugagacacucuuucug

SEQ ID NO: 5202 - DNA, 21 bp, Artificial Sequence
  source: /note="Description of Artificial Sequence: Synthetic oligonucleotide"
  source: /note="Description of Combined DNA/RNA Molecule: Synthetic oligonucleotide"
gaaagagugtcucauctucuu

SEQ ID NO: 5203 - RNA, 23 nt, Artificial Sequence
  source: /note="Description of Artificial Sequence: Synthetic oligonucleotide"
aagaagaugagacacucuuucug

SEQ ID NO: 5204 - RNA, 21 nt, Artificial Sequence
  source: /note="Description of Artificial Sequence: Synthetic oligonucleotide"
gaaagagugucucaucuucuu

SEQ ID NO: 5205 - RNA, 23 nt, Artificial Sequence
  source: /note="Description of Artificial Sequence: Synthetic oligonucleotide"
aagaagaugagacacucuuucug

SEQ ID NO: 5206 - RNA, 21 nt, Artificial Sequence
  source: /note="Description of Artificial Sequence: Synthetic oligonucleotide"
gaaagagugucucaucuucuu

SEQ ID NO: 5207 - RNA, 23 nt, Artificial Sequence
  source: /note="Description of Artificial Sequence: Synthetic oligonucleotide"
aagaagaugagacacucuuucug

SEQ ID NO: 5208 - RNA, 21 nt, Artificial Sequence
  source: /note="Description of Artificial Sequence: Synthetic oligonucleotide"
gaaagagugucucaucuucuu

SEQ ID NO: 5209 - RNA, 23 nt, Artificial Sequence
  source: /note="Description of Artificial Sequence: Synthetic oligonucleotide"
aagaagaugagacacucuuucug

SEQ ID NO: 5210 - DNA, 21 bp, Artificial Sequence
  source: /note="Description of Artificial Sequence: Synthetic oligonucleotide"
  source: /note="Description of Combined DNA/RNA Molecule: Synthetic oligonucleotide"
gaaagagugtcucaucuucuu

SEQ ID NO: 5211 - RNA, 23 nt, Artificial Sequence
  source: /note="Description of Artificial Sequence: Synthetic oligonucleotide"
aagaagaugagacacucuuucug

SEQ ID NO: 5212 - DNA, 21 bp, Artificial Sequence
  source: /note="Description of Artificial Sequence: Synthetic oligonucleotide"
  source: /note="Description of Combined DNA/RNA Molecule: Synthetic oligonucleotide"
gaaagagugtcucaucuucuu

SEQ ID NO: 5213 - RNA, 23 nt, Artificial Sequence
  source: /note="Description of Artificial Sequence: Synthetic oligonucleotide"
aagaagaugagacacucuuucug

SEQ ID NO: 5214 - DNA, 21 bp, Artificial Sequence
  source: /note="Description of Artificial Sequence: Synthetic oligonucleotide"
  source: /note="Description of Combined DNA/RNA Molecule: Synthetic oligonucleotide"
gaaagagugtcucaucuucuu

SEQ ID NO: 5215 - RNA, 23 nt, Artificial Sequence
  source: /note="Description of Artificial Sequence: Synthetic oligonucleotide"
aagaagaugagacacucuuucug

SEQ ID NO: 5216 - DNA, 21 bp, Artificial Sequence
  source: /note="Description of Artificial Sequence: Synthetic oligonucleotide"
  source: /note="Description of Combined DNA/RNA Molecule: Synthetic oligonucleotide"
cagaaagagtgucucaucuua

SEQ ID NO: 5217 - DNA, 23 bp, Artificial Sequence
  source: /note="Description of Artificial Sequence: Synthetic oligonucleotide"
  source: /note="Description of Combined DNA/RNA Molecule: Synthetic oligonucleotide"
uaagatgagacactcuutcuggu

SEQ ID NO: 5218 - DNA, 21 bp, Artificial Sequence
  source: /note="Description of Artificial Sequence: Synthetic oligonucleotide"
  source: /note="Description of Combined DNA/RNA Molecule: Synthetic oligonucleotide"
cagaaagagtgucucaucuua

SEQ ID NO: 5219 - DNA, 23 bp, Artificial Sequence
  source: /note="Description of Artificial Sequence: Synthetic oligonucleotide"
  source: /note="Description of Combined DNA/RNA Molecule: Synthetic oligonucleotide"
uaagaugagacacuctuucuggu

SEQ ID NO: 5220 - DNA, 21 bp, Artificial Sequence
  source: /note="Description of Artificial Sequence: Synthetic oligonucleotide"
  source: /note="Description of Combined DNA/RNA Molecule: Synthetic oligonucleotide"
cagaaagagtgucucaucuua

SEQ ID NO: 5221 - RNA, 23 nt, Artificial Sequence
  source: /note="Description of Artificial Sequence: Synthetic oligonucleotide"
uaagaugagacacucuuucuggu

SEQ ID NO: 5222 - DNA, 21 bp, Artificial Sequence
  source: /note="Description of Artificial Sequence: Synthetic oligonucleotide"
  source: /note="Description of Combined DNA/RNA Molecule: Synthetic oligonucleotide"
cagaaagagtgucucaucuua

SEQ ID NO: 5223 - RNA, 23 nt, Artificial Sequence
  source: /note="Description of Artificial Sequence: Synthetic oligonucleotide"
uaagaugagacacucuuucuggu

SEQ ID NO: 5224 - DNA, 21 bp, Artificial Sequence
  source: /note="Description of Artificial Sequence: Synthetic oligonucleotide"
  source: /note="Description of Combined DNA/RNA Molecule: Synthetic oligonucleotide"
cagaaagagugucucatcuua

SEQ ID NO: 5225 - DNA, 23 bp, Artificial Sequence
  source: /note="Description of Artificial Sequence: Synthetic oligonucleotide"
  source: /note="Description of Combined DNA/RNA Molecule: Synthetic oligonucleotide"
uaagatgagacactcuutcuggu

SEQ ID NO: 5226 - DNA, 21 bp, Artificial Sequence
  source: /note="Description of Artificial Sequence: Synthetic oligonucleotide"
  source: /note="Description of Combined DNA/RNA Molecule: Synthetic oligonucleotide"
cagaaagagugucucatcuua

SEQ ID NO: 5227 - DNA, 23 bp, Artificial Sequence
  source: /note="Description of Artificial Sequence: Synthetic oligonucleotide"
  source: /note="Description of Combined DNA/RNA Molecule: Synthetic oligonucleotide"
uaagaugagacacuctuucuggu

SEQ ID NO: 5228 - DNA, 21 bp, Artificial Sequence
  source: /note="Description of Artificial Sequence: Synthetic oligonucleotide"
  source: /note="Description of Combined DNA/RNA Molecule: Synthetic oligonucleotide"
cagaaagagugucucatcuua

SEQ ID NO: 5229 - RNA, 23 nt, Artificial Sequence
  source: /note="Description of Artificial Sequence: Synthetic oligonucleotide"
uaagaugagacacucuuucuggu

SEQ ID NO: 5230 - DNA, 21 bp, Artificial Sequence
  source: /note="Description of Artificial Sequence: Synthetic oligonucleotide"
  source: /note="Description of Combined DNA/RNA Molecule: Synthetic oligonucleotide"
cagaaagagugucucatcuua

SEQ ID NO: 5231 - RNA, 23 nt, Artificial Sequence
  source: /note="Description of Artificial Sequence: Synthetic oligonucleotide"
uaagaugagacacucuuucuggu

SEQ ID NO: 5232 - RNA, 21 nt, Artificial Sequence
  source: /note="Description of Artificial Sequence: Synthetic oligonucleotide"
cagaaagagugucucaucuua

SEQ ID NO: 5233 - DNA, 23 bp, Artificial Sequence
  source: /note="Description of Artificial Sequence: Synthetic oligonucleotide"
  source: /note="Description of Combined DNA/RNA Molecule: Synthetic oligonucleotide"
uaagatgagacactcuutcuggu

SEQ ID NO: 5234 - RNA, 21 nt, Artificial Sequence
  source: /note="Description of Artificial Sequence: Synthetic oligonucleotide"
cagaaagagugucucaucuua

SEQ ID NO: 5235 - DNA, 23 bp, Artificial Sequence
  source: /note="Description of Artificial Sequence: Synthetic oligonucleotide"
  source: /note="Description of Combined DNA/RNA Molecule: Synthetic oligonucleotide"
uaagaugagacacuctuucuggu

SEQ ID NO: 5236 - RNA, 21 nt, Artificial Sequence
  source: /note="Description of Artificial Sequence: Synthetic oligonucleotide"
cagaaagagugucucaucuua

SEQ ID NO: 5237 - RNA, 23 nt, Artificial Sequence
  source: /note="Description of Artificial Sequence: Synthetic oligonucleotide"
uaagaugagacacucuuucuggu

SEQ ID NO: 5238 - RNA, 21 nt, Artificial Sequence
  source: /note="Description of Artificial Sequence: Synthetic oligonucleotide"
cagaaagagugucucaucuua

SEQ ID NO: 5239 - RNA, 23 nt, Artificial Sequence
  source: /note="Description of Artificial Sequence: Synthetic oligonucleotide"
uaagaugagacacucuuucuggu

We claim:

1. A double-stranded ribonucleic acid (dsRNA) for inhibiting expression of ALAS1, wherein said dsRNA comprises a sense strand and an antisense strand, the antisense strand comprising a region of complementarity to an ALAS1 RNA transcript (e.g., SEQ ID NO:1), which antisense strand comprises at least 20 contiguous nucleotides from the antisense sequence of UAAGAUGAGACACUCUUUCUGGU (SEQ ID NO: 4153) or UAAGAUGAGACACUCTUUCUGGU (SEQ ID NO: 4154).

2. A double-stranded ribonucleic acid (dsRNA) for inhibiting expression of ALAS1, wherein said dsRNA comprises a sense strand and an antisense strand, the antisense strand comprising a region of complementarity to an ALAS1 RNA transcript (e.g., SEQ ID NO:1), which antisense strand comprises at least 20 contiguous nucleotides from (i) an antisense sequence listed in any one of Tables 21 to 40, or (ii) an unmodified version of an antisense sequence listed in any one of Tables 21 to 40 (SEQ ID NOs: 4172 to 5237).

3. The dsRNA of claim 2, wherein said dsRNA comprises at least one modified nucleotide.

4. The dsRNA of any one of the preceding claims, wherein the duplex region is 17-23 nucleotide pairs in length.

5. The dsRNA of any one of the preceding claims, wherein at least one strand comprises a 3′ overhang of at least 2 nucleotides.

6. The dsRNA of any one of the preceding claims, wherein each strand is no more than 26 nucleotides in length.

7. The dsRNA of claim 3, wherein at least one modified nucleotide is chosen from a 2′-O-methyl, a 2′-fluoro modified nucleotide, and optionally one or more 5′-phosphorothioate groups, or any combination thereof.

8. The dsRNA of any one of the preceding claims, further comprising a ligand, optionally wherein the ligand is conjugated to the 3′ end of the sense strand of the dsRNA.

9. The dsRNA of claim 8, wherein the ligand comprises a carbohydrate, optionally wherein the ligand is a GalNAc ligand.

10. The dsRNA of claim 9, wherein the ligand is

[chemical structure]

11. The dsRNA of any one of claims 8-10, wherein the ligand is attached via a bivalent or trivalent branched linker.

12. The dsRNA of claim 11, wherein the ligand and linker are as shown in Formula XXIV:

[chemical structure]

13. The dsRNA of claim 8, wherein the dsRNA is conjugated to ligand L96 via a linker as shown below

[chemical structure]

14. The dsRNA of any one of claims 8 to 13, wherein the ligand targets the dsRNA to hepatocytes.

15. The dsRNA of any one of the preceding claims, wherein the dsRNA comprises a sense strand consisting of a sense sequence selected from the sense sequences listed in Tables 21 to 40, and an antisense strand consisting of an antisense sequence selected from the antisense sequences listed in Tables 21 to 40.

16. The dsRNA of any one of the preceding claims, wherein the dsRNA has an IC₅₀ of less than 1 nM, less than 0.05 nM, less than 0.02 nM, or less than 0.01 nM.

17. The dsRNA of any one of the preceding claims, wherein the dsRNA has a single dose ED50 of less than about 10 mg/kg or less than about 5 mg/kg.

18. The dsRNA of any one of the preceding claims, wherein the dsRNA shows improved activity compared with AD-58632 or AD-60489, optionally wherein the dsRNA is selected from the dsRNAs listed in Tables 21 to 40.

19. The dsRNA of any one of the preceding claims, wherein the sense strand comprises or consists of the sequence of CAGAAAGAGUGUCUCAUCUUA (SEQ ID NO: 4155).

20. The dsRNA of claim 1 or 2, wherein:
(i) the antisense strand comprises the antisense sequence of AD-60519, wherein the antisense sequence comprises all of the modified nucleotides of AD-60519;
(ii) the antisense strand consists of the antisense sequence of AD-60519, wherein the antisense sequence comprises all of the modified nucleotides of AD-60519;
(iii) the sense strand comprises the sense sequence of AD-60519, wherein the sense sequence comprises all of the modified nucleotides of AD-60519;
(iv) the sense strand consists of the sense sequence of AD-60519, wherein the sense sequence comprises all of the modified nucleotides of AD-60519;
(v) the sense strand comprises the sense sequence of AD-60519, and the antisense strand comprises the antisense sequence of AD-60519, wherein the sense and antisense sequences comprise all of the modified nucleotides of AD-60519, or
(vi) the sense strand consists of the sense sequence of AD-60519, and the antisense strand consists of the antisense sequence of AD-60519, wherein the sense and antisense sequences comprise all of the modified nucleotides of AD-60519.

21. The dsRNA of claim 1 or 2, wherein:
(i) the antisense strand comprises the antisense sequence of AD-60489, and/or the sense strand comprises the sense sequence of AD-60489, wherein the antisense and/or sense sequence comprises all of the modified nucleotides of AD-60489, or
(ii) the antisense strand consists of the antisense sequence of AD-60489, and/or the sense strand consists of the sense sequence of AD-60489, wherein the antisense and/or sense sequence comprises all of the modified nucleotides of AD-60489.

22. The dsRNA of claim 1 or 2, wherein:
(i) the antisense strand comprises the antisense sequence of AD-61193, and/or the sense strand comprises the sense sequence of AD-61193, wherein the antisense and/or sense sequence comprises all of the modified nucleotides of AD-61193, or
(ii) the antisense strand consists of the antisense sequence of AD-61193, and/or the sense strand consists of the sense sequence of AD-61193, wherein the antisense and/or sense sequence comprises all of the modified nucleotides of AD-61193.

23. The dsRNA of claim 2, wherein:
(i) the antisense strand comprises the antisense sequence of AD-60819, and/or the sense strand comprises the sense sequence of AD-60819, wherein the antisense and/or sense sequence comprises all of the modified nucleotides of AD-60819, or
(ii) the antisense strand consists of the antisense sequence of AD-60819, and/or the sense strand consists of the sense sequence of AD-60819, wherein the antisense and/or sense sequence comprises all of the modified nucleotides of AD-60819.

24. A vector encoding at least one strand of a dsRNA of any one of claims 1 to 23.

25. A cell comprising the dsRNA of any one of claims 1 to 23 or the vector of claim 24.

26. A pharmaceutical composition for inhibiting expression of an ALAS1 gene, the composition comprising the dsRNA of any one of claims 1 to 23.

27. The pharmaceutical composition of claim 26, wherein dsRNA is administered in an unbuffered saline or water solution.

28. The pharmaceutical composition of claim 26 or 27, wherein said composition is suitable for subcutaneous administration.

29. A method of inhibiting ALAS1 expression in a cell, the method comprising:
(a) introducing into the cell the dsRNA of any one of claims 1 to 23, and
(b) maintaining the cell of step (a) for a time sufficient to obtain degradation of the mRNA transcript of an ALAS1 gene, thereby inhibiting expression of the ALAS1 gene in the cell, optionally wherein the expression of ALAS1 is inhibited by at least 20% or at least 30%.

30. A method for decreasing a level of a porphyrin or a porphyrin precursor (e.g., ALA or PBG) in a cell (e.g., a hepatocyte), comprising contacting the cell with the dsRNA of any one of claims 1 to 23, in an amount effective to decrease the level of the porphyrin or the porphyrin precursor in the cell.

31. A method of treating a porphyria, the method comprising administering to a subject in need of such treatment a therapeutically effective amount of
(i) the dsRNA of any one of claims 1 to 23 or
(ii) the composition of any one of claims 26 to 28,
thereby treating the porphyria.

32. The method of claim 31, wherein the subject is at risk for developing, or is diagnosed with, a porphyria.

33. The method of claim 31 or 32, wherein the porphyria is acute intermittent porphyria or ALA-dehydratase deficiency porphyria.

34. The method of any one of claims 31 to 33, wherein (i) the dsRNA or composition comprising dsRNA is administered after an acute attack of porphyria, (ii) the dsRNA or composition comprising dsRNA is administered during an acute attack of porphyria, or (iii) the dsRNA or composition comprising dsRNA is administered prophylactically to prevent an acute attack of porphyria.

35. The method of any one of claims 31 to 34, wherein the dsRNA is administered at a dose of 0.05 to 50 mg/kg bodyweight of the subject, e.g, at a dose of 0.01 mg/kg to 5 mg/kg bodyweight of the subject.

36. The method of any one of claims 31 to 35, wherein the method
(i) decreases a level of a porphyrin or a porphyrin precursor (e.g., δ-aminolevulinic acid (ALA) or porphopilinogen (PBG)) in the subject, optionally wherein the level is decreased by at least 30% and/or
(ii) inhibits ALAS1 expression in the subject.

37. The method of any one of claims 31 to 36, wherein said method (i) ameliorates a symptom associated with an ALAS1 related disorder (e.g., a porphyria), (ii) decreases frequency of acute attacks of symptoms associated with a porphyria in the subject, and/or (iii) decreases incidence of acute attacks of symptoms associated with a porphyria in the subject when the subject is exposed to a precipitating factor, e.g., the premenstrual phase.

38. The method of claim any one of claims 31 to 37, wherein the dsRNA or composition comprising the dsRNA is administered according to a dosing regimen, e.g., weekly, biweekly, or monthly.

39. The method of any one of claims 31 to 38, wherein the dsRNA is administered before an acute attack of porphyria, e.g., during a prodrome.

40. The method of claim any one of claims 31 to 39, wherein the subject has an elevated level (e.g., plasma or urine level) of ALA and/or PBG and optionally wherein the subject suffers from chronic pain.

41. The method of any one of claims 31 to 40, wherein the method decreases the elevated level of ALA and/or PBG.

42. The method of any one of claims 31 to 41, wherein the method decreases or prevents pain, neuropathy, and/or nerve damage.

43. The method of any one of claims 31 to 42, wherein the method prevents acute attacks of porphyria.

44. The method of any one of claims 31 to 43, wherein the dsRNA or composition comprising the dsRNA is administered repeatedly.

45. A method of treating a subject with an elevated level of ALA and/or PBG, the method comprising administering to a subject in need of such treatment a therapeutically effective amount of
(i) the dsRNA of any one of claims 1 to 23 or
(ii) the composition of any one of claims 26 to 28.
optionally, wherein the method is effective to decrease the level of ALA and/or PBG.

46. A method of treating a subject having an increased level of ALA and/or PBG, the method comprising administering the dsRNA of any one of claims 1 to 23 at 1 mg/kg, 2.5 mg/kg, or 5 mg/kg once per week for at least ten weeks, thereby reducing the level of ALA and/or PBG in said subject.

47. A method of treating a human patient with AIP who has suffered from multiple recurrent attacks, the method comprising administering the dsRNA of any one of claims 1 to 23 at a dose of 2.5 mg/kg for at least 6 months, thereby treating said patient,
optionally wherein said method
(i) reduces the frequency of attacks,
(ii) reduces hematin use,
(iii) reduces hospitalization, and/or
(iv) improves quality of life.

48. A method for assaying the level of circulating extracellular ALAS1 mRNA in a subject, said method comprising:
detecting (e.g., measuring) the level of ALAS1 mRNA in a biological fluid sample (e.g., a blood sample, a plasma sample, a serum sample, or a urine sample) from the subject, said biological fluid sample comprising the ALAS1 mRNA,
thereby assaying the level of circulating extracellular ALAS1 mRNA in the subject.

49. A method for assaying the level of circulating extracellular ALAS1 mRNA in a subject, said method comprising
(i) providing RNA (e.g., extracellular RNA) from a biological fluid sample (e.g., a blood sample, a plasma sample, a serum sample, or urine sample) from the subject, said biological fluid sample comprising the ALAS1 mRNA;
(ii) obtaining an ALAS1 cDNA from the ALAS1 mRNA;
(iii) contacting the ALAS1 cDNA with a nucleic acid complementary (e.g., probe and/or primer) to the ALAS1 cDNA or a portion thereof, thereby producing a reaction mix; and
(iv) detecting (e.g., measuring) the level of ALAS1 cDNA in the reaction mix, wherein the ALAS1 cDNA level is indicative of the ALAS1 mRNA level,
thereby assaying the level of circulating extracellular ALAS1 mRNA in the subject, optionally wherein
(a) the method comprises PCR, qPCR or 5′-RACE,
(b) the nucleic acid is a probe or primer, and/or
(c) the nucleic acid comprises a detectable moiety and the level of ALAS1 mRNA is determined by detection of the amount of the detectable moiety.

50. The method of claim 49, wherein the efficacy of a porphyria treatment is assessed based on a comparison of the level of circulating extracellular ALAS1 mRNA in the subject with a reference value.

51. The method of claim 49, wherein a decrease in the level of of circulating extracellular ALAS1 mRNA in the subject in response to the porphyria treatment, relative to the reference value, indicates that the porphyria treatment is efficacious.

52. The method of any one of claims 49 to 51, further comprising acquiring the biological fluid sample from a subject, optionally wherein the biological fluid sample is separate from the tissue, and wherein the biological fluid sample contains exosomes.

53. A composition comprising the dsRNA of claim 20 and water for injection.

54. The composition of claim 53, comprising about 200 mg/mL of the dsRNA of claim 20.

55. The composition of claim 53 or 54, wherein the composition has a pH of 6.0-7.5, e.g., about 7.0.

56. The composition of any one of claims 53 to 55, wherein the composition is formulated for subcutaneous injection.

57. A method of treating a subject having a porphyria (e.g., AIP) or an elevated level of ALA and/or PBG, the method comprising subcutaneously administering the composition of any one of claims 53 to 56 to the subject.

58. The method of claim 57, wherein the composition is administered at a dose of 0 to 5 mg/kg, e.g., at a dose of 2.5 mg/kg or less or at a dose of 1 to 2.5 mg/kg.

59. The method of claim 58, wherein the composition is administered weekly.
